United States Patent Application Publication US 2015/0315605 A1 - sequence listing, part 34

SEQ ID NO: 68481 - protein, 384 aa, Zea Mays
MSLCLRAADEERRWEVAGAKGLAHLAAPLVNILTHTDEIKLKAKRIAAVEKKKRCLGMKILSTKEASGGLQRCADYFGMPTAPSESNKEPRPEECVNELGIKQPVQHVASEEQEGVQDDAKADANVMNVSFGKGKSEDSFGTINGTNSGDKIESPSGLAERTLTQPTTKGCSKQRGRSSNGRGNRTKKIEEGNASGLIAVAPESEDDDDDAAFIDGNQAEGGALWDIFRREDVSKLHDYLMKHAHEFRHCNFEPVKQVTHPIHDQCFYLTIEHKRKLKEEYGVEPWTFEQKLGEAVFIPAGCPHQVRNLKSCIKVALDFVSPENVRECIRLTEGFRLLPKWHKVNEDKLEVKKIALHAFNQAIKDITDESSNSNERAHKILMCW

SEQ ID NO: 68482 - protein, 515 aa, Zea Mays
MWRRQQTLLRRLPPLRVVAQAPASWPACRLGRFCGSVPEKRKGKAAPLQARGMVDRFRMRAKGGDGGNGCVSLRRSRSNRQGMPDGGSGGKGGDVILECSRSIWDFSGLQHHMIAQVPVGTVIHLVEGEQPSLTVNKPTRALDPWDIPSAEEHSSDLDQIVNIVAEGFDGGLSHRHIAPKHNTDGNDTVKGSSSHSEDPKYFHTCSKLQFSNSNRDVRIYSCQEGTDEKDQTESEDEEFWEDEDEFDMDEEEEEDEKEEQDVQYCVAEMTKPGQRLIIARGGKGGLGNAFVMKEMRPSKANRQEKIARLSTGQPGTESILILELKSIADVGLVGLPNAGKSTLLSALSRAQPEIADYEFTTLRPNIGSLTYEDYFSVKVADIPGLIKGAHENRGLGHAFLRHIERTKVIAYVLDLAATLNGRKGIPPWEQLHDLVTELEHYQKGMTRRPSLIVANKIDEEGAEEMYEELKRRVQGVPIFPVCAILQEGVPDLRVGLRNLMDDSDPQGVDFEENDC

SEQ ID NO: 68483 - protein, 142 aa, Zea Mays
MGISQDTHESMATDAANYLCHQLQHLLGPISSATSQSGPWEERSVMVRLTQKLQKSKRNKWWRQRRRKHVAELFQKERADYDRVDQEADEWRAKQIAKDIAKRRVESMQQIARKKTNEERKRLESESVIEKERRGDYIGKTL

SEQ ID NO: 68484 - protein, 347 aa, Zea Mays
MARLPLAACAVAAAFYLCLHLASSSSSAPRLAPAPSDGGRRAGRTAYHFQPAKNWQNGPMYYNGMYHLFYQYNPHGALWGVGNLSWGHSVSGDLVNWAALDTALDPTSPFDANGCWSGSATILPGGTPAILYTGIDANGEQVQNVAFPRDPADPLLRRWDKPGYNPVIPLPADVPGDKFRDPSTAWLGRDGLWRVAVSAEVRGVASTLVYRSADFLRWERAPAAAPLHASRAAGMVECPDLFPVKEEGDDGDGQGLDASASGAGLRHVLKLSVMDTLQDYYMVGRYDDAADAFVPAEPERGDDVRGWRRLDYGHVYASKTFFDARGSRRVLWAWANESDSQADDIAK

SEQ ID NO: 68485 - protein, 534 aa, Zea Mays
MTLSLGLLRSGLLNRRINQPANQVLRLHLAFSSASPSPSDPSAAAAGPQTTIREGKVEIFLDESNSVFYNKTQVNNRDISIAVLRSFILKRHEEYAARSRKGPGDTTLSAQAKYKEPKVLEALAASGLRAIRYAVEVDGIGEVTAVDNNEAAVEACKKNIQHNGSLASSKVVPHHADARVYMLTHPKEFDVVDLDPYGSPAAFLDSAVQCVADGGILMCSATDMAVLAGGNAEVCFSKYGSYPLRGKHCHEMALRILLACIESHAIRHKRYIVPIISVHMDFYIRVFVRIFTSASTVKSSPLKLAHVYQCTGCNSFYLQNIGRIHSKDKENIAVPNFRLTLPEVCSECGHQFVMGGPLWSYPIHDKVWAASILSDIHAMREAYPAYPKISAILSSVSEELLEAPLFVSLHNLCAILKCTTPTMVMLQCAIRNAGYQVSGSHVDPLALKTDAPMSVIWDIMRCWVKLHPVKHRPGNHPGNVILSQEPKFQAKFSRVLGASVTRKRARFMPNPEKYWGPGTKAGRNPRTFQMDNRN

SEQ ID NO: 68486 - protein, 267 aa, Zea Mays
MVPNAVDTAMFTPSPKRLNCDEIVIVVVSRLVYRKGADLLVEVIPEVCRLFPKVHFIVGGDGPKRVRLEEMREKFSLQDRVEMLGAVPHAQVRSVLISGHIFLNSSLTEAFCIAILEAASCGLLTVSTRVGGVPEVLPDDMIVLAEPAPGDMVRAVKKAIDMLPGIDPQIMHLRMKELYSWDDVAKRTEIVYDRAMESPTTNLLDRLPRYLTCGSWAGKLFCLVMIINYLLWRLLEFLQPAVGIEEVPDIGPLHAHLGSRNDEAQEK

SEQ ID NO: 68487 - protein, 181 aa, Zea Mays
MSFLRSLANSFSSLLFSSGGETAPMDAAGSAPSPAAVVRERVAVKLRGYFDLAKEEMDKAVRAEEWGLPDDATAHYRNAMRVMLEAQAARVPDAVSSSERGQVRVYQEKIAKWQAQVEERLRVLGQRSAEGATAAVVPKKVIVCGLLAACGCVIWNSVLSCIGLLFHSLNICYLLNFDAFI

SEQ ID NO: 68488 - protein, 691 aa, Zea Mays
MCEDLENIDDLHMIFKLVKGIILLNSPSIFDKIFSDEFILDIIGALEYDPEVPRVQNHRAFLKDHVVFKEAIRIENVSVVSKIHQTYRIGYLKDVILPRILDDATLASLNTMIHSNNASVISLLKDDTLFIRRLFARMRSSDISMESKRELVLFLHEFCTLSKSLPLVQQLRLFRDLSGEGVFEIISDVLQSQDRKIISAGTDILILFLNQDPNLLRSYIVQQEGNSLLGLLVKGMVTDFSEEMHCQFLEILRILMDSFTTSGAHRDVVIEIFYERHLDYLVDVIASSCPPRSLSRSSSNSVHVGGNAEGHCIKPEILLNVCELLCFCVVHHPYRIKCNFLMNNAIEKILTLTQRREKFLVVAAVRFMRTIISRNDDHLIRHVVKFNLLKPIIDVFVDNGERYNMLHSGVLELLEYIRKENIKTLIIYAIESFWDELAIFEHFGSIQAFKLKYQQYLESAEPRLNASVPDMRKKAEQRGLEKEEEDYFNEDSDEEDSGSGRRAKHAQNQNNKPKSKVPNGSEADDTDGASRPKSAGLVDYDDDDDEDFNPPPKEPSRPAEDDVPLNISPLKRKPVNAVDGKHSDGEGRRRQKIETRISCAKIAAVTSTAIKHTDLQNKYASHLLTSATPSTEANGIFSEHGTNYEEQQHPMENTETSRQTGGDCIKDVGSMSPEKAVNTTNTSDSEPYSVR

SEQ ID NO: 68489 - protein, 306 aa, Zea Mays
MEMRARESVSMSKDLTGEITPFATALHDVFLHSHCSSCFTKLLPQTPCVMSCMTCCSLRYCCSECLRADSVVHVSSGECCFFVDHLKRASPSYVTEGTSDLRAALRLLCVLEIHGLVSPDSINHYSRIGGLSASGIEEALKEGEVIAERILEGSLLMSSARKSRAQTCVIFSDRLKLEKMALWAVIINSVEVQLSEGLALGVAVYGPSFSWFNHSCFPSASYRFVLAPRNEDCASQKSKSSVVPASKGVAADVWHAWQYEDHSTHALCKYGPRVVVRCIKPINKGDEVCITYIDLLQTRVLFLEFC

SEQ ID NO: 68490 - protein, 86 aa, Zea Mays
MPWVACSTVPVAAFPNLHGAPFLPQLGPCLAERVLPHALLCLPWRARAPWSAAAPWLAVAPCCSSPPARRAAHMACSSLPSGSSPR

SEQ ID NO: 68491 - protein, 174 aa, Zea Mays
MADRSDGPIGRLPEHLIIEILIRLPVYEWVQLACVNKHWASIFQGECVWQTAIARNWPSAGLRKRWPGPIPRGSARRRFQALYVSENLVPSGGEIDELVGHTYLYLKEQLERPVMPPSSILHGTIIDQFIACGNTGEKAHDLASKIWLAVIDSLEENQQTFLLLKRVAQEGEII

SEQ ID NO: 68492 - protein, 139 aa, Zea Mays
MEALLELEKMQRVLSLMSSRGLSHTDSSCGGAAADRFLAQFLLFMVQPFDSLTLENKFLLISELLRKATPNTLEEVQHLTHLEANKDICSGGSLQPIKKFKMHAEKSTVQAMPMVGFDAMARAKSTLEDFVCILCSWYS

SEQ ID NO: 68493 - protein, 468 aa, Zea Mays
MGSKSVDEVLDAAAAGVHYSALRLDGQASATTSGLENGHQEPFVIGVAGGASSGKSTVCKMIIDQLRDQRVVVVTQESFYYGLTDEELVHVHNYNFDHPDAFHTELLLSCMQNLKCGKAVDIPNYNFKTYKSVPNARKVNPSDVIILEGILVFHDSRLRDLMNMKIFVDTDADVRLTRRIHRDTIDKGRDLKAVLEQFSKFVKPAFEDFILPTKKYADVIIPRGGDNDVAIDLIVQHIRTKLGQHDLRKIHPNLYVIQTTYQIRGMHTIIRDAATATHDFIFYADRLIRLEKQVITPTGSVYTGVEFSKRLCGISVIRSGESMENALRACCKGIKIGKILIHREGDNGQQLIYQNLPKDIANRHVLLLDPILGTGNSAVQAISLLLKKGVQEANIIFLNLISAPQGVHVVCKRFPRMKIVTSEIESGLNDDFRVVPGMGEFGDRYFGTDEYQSSTPFFCDDKNRVRLL

SEQ ID NO: 68494 - protein, 193 aa, Zea Mays
MQKKYFEKQFELAEAVKLPMFLHMRAAGEDFCEIMTRNLHRFPGGVTHSFTDSAEDRDMLLSFEKMFIGVNGCSLKTNENLEVLRGIPVERLMIETDSPYCDIRNTHAGSQYVKSVWPSKKKEKYEPDSTVKGRNEPCLVRQVLEVVAGSKGISDIEGLSRTLYHNTCRLFFPQDLDASANAQLESGTAVQDC

SEQ ID NO: 68495 - protein, 54 aa, Zea Mays
MVKDLVFPVNVHLGQHFTKPPPRYSEGALIKKLEELGIGRPSTYASIMKVLLVT

SEQ ID NO: 68496 - protein, 489 aa, Zea Mays
MVRKRLGYSSRGHRIPTMPRVPNSARGKRSTRRKKDENDDMCAMDLLATVAGKLLADQDNSSSVPNTSAAKAKKRKSVKEEHFDEIPPLKNVAMEKDVGSGSVSAFPRQAKNCLAENSSTRNGADTVLESLTVKSNMLAKIPECGSYGIHHAGSSSSAEPEQVHQAEPKVSRRQADGHPVAYGIFNSVDVDGKPPALVSSDSSSCVPLSSHDKEHQTSSLYRGVVQYTADREDDENSSGCTHPSTIESKGCKPQYLGNHRIRKLLASKVRKAARNKICGGIPSKKICGGLSKKGSKLNLCGKKMSTTHQKVQRMIFKKKKLTHRTSFAKEMLTEASGTSFAMEGQNKSCEAENYHVKLRIKSFNIPELFIKVPENATIGSLKRAVMDVVNSIMEGGLRVGVLLQGKDIQDDNKTLCQAGICHDKKLNNIDFTLECEREREPPSGVIIQEQMDFLTTDMVEPLARWLHRTRRRAPRPSSLFRLRLQTWAL

SEQ ID NO: 68497 - protein, 113 aa, Zea Mays
MRKRKETNPSIPGKRILGMLTCPATEMVDGSRVLYFEQAFWRSPEKPFRQRFYMVKPCPKEMKCDVELSSYAIRDAEEYKNFCDRQKDQRPQAEEVIAVCHFEHNLTFQTVCF

SEQ ID NO: 68498 - protein, 90 aa, Zea Mays
MTLNLKIYSNHSFTSCKGMILIPWIDELNGYFKLKLVFLYKRWFYLKEYLWSGSFTFYETILFICCHMSDVIFKCAYTNILIVLADLEFI

SEQ ID NO: 68499 - protein, 77 aa, Zea Mays
MSDTAAKVTESRWPPVKNSGWTREMAPRTSYPSPALSVPHRARIRTAAARIAAGIIGGELSWRPDPFQVTVPVISQK

SEQ ID NO: 68500 - protein, 383 aa, Zea Mays
MHNSILLLRELQLPIEAGSQAPSNQPDARNRNHRLADVGDDGARAPPDVPHVLVLPVRPRAPHHLLPVHRRLLPALLRPLPPRDRPAGAPRVPAAALSAAPVPPAAPARRPPAPLGHIRRGAGDDGTRPRVPPACCAGAGTCHASCSCAGAGSTARALPAAAAAGTAAADHGPGRRPRELLHGAEPEQPHRGADAERPAGAGAGAAVGHRLAPDGADHRGTPVGRLAVPRVQGGLRARGGRAAAAVQARLPLRLHRAVAPPAQLLPGLPVPAAGSRVHVQRRQPGRTSRRKRRRQEQQERGEGERAPDVGAVGAVLVAVPTARDGRPRRRVGARAARQARRGRRRRILRLVALSVSHIDDMCFQRRTRILPSNCINVNGGSLM

SEQ ID NO: 68501 - protein, 85 aa, Zea Mays
MAVLSSFPTPVGSLWCSPSLARQTGKETAEFLCAQPRLLARPAPDPKLVTLCARLCLVAKPRRRRASLPIAKFPAVSLRTCPRPS

SEQ ID NO: 68502 - protein, 148 aa, Zea Mays
MRALGFEMTPEVRTRDVCQWRRQPNRADDRGGGQGRQRHHRLRRVRAHDDGQDGRAGRPGRAPQGVPHHRPGRQRKDLGHGHPAAGHRDRRALHAGRGPGDDRGRRRGRRRRDRPGGVHEDDEADRLWLWVLVVTDKPIPTYIDTYHR

SEQ ID NO: 68503 - protein, 1292 aa, Zea Mays
MTLLLGPPSSGKTTLLLALAGKLDPALTRAGEVTYNGFRLDEFVPQKTAAYISQTDVHVGEMTVKETLDFSARCQGVGTKYDLMTELARREKEAGIRPEPEVDLFMKATSMEGVGSSLQTDYTLRILGLDICADTIVGDQMQRGISGGQKKRVTTGEMIVGPTKVLFMDEISTGLDSSTTFQIVKCLQQIVHLGEATILMSLLQPAPETFDLFDDIILLSEGQIVYQGPREHVLEFFESCGFSCPERKGTADFLQEVTSRKDQEQYWADKQRPYRYISVPEFAQRFQRFHVGLQLENHLSLPFDKSRSHQAALVFSKHSVSTTELLKASFDKEWLLIKRNSFVYIFKTLQLIIVALVASTVFLRTHMHTRNLDDGFVYIGALLFTLIVNMFNGFAELSLAITRLPVFFKHRDLLFYPAWVFTLPNVILRIPFSIIESIVWVLVTYYTIGFSPEADRFFKHLLLVFLIQQMAGGLFRAIAGLCRSMIIAHTGGALSLLLFFVLGGFLLPKAFIPKWWIWGYWISPLMYGYNALAVNEFYSPRWMNKFVLDQNGVPKRLGIAMLEGANIFVDKNWYWIGAAGLLGFTIFFNVLFTLSLMYLNPLGKPQAIISEETAKEAEGNGHAKGTIRNGSTKSKDGSHDKEMKEMRLNARLSSSSSNGVSRVMSIGSNEAALSRGMVLPFNPLAMSFDNVNYYVDMPAEMKQQGVQDDRLQLLREVTGSFRPGVLTALMGVSGAGKTTLMDVLAGRKTGGYIEGDIRIAGYPKNQATFARISGYCEQNDIHSPQVTVRESLIYSAFLRLPEKIGDKEITDDIKIQFVDEVMELVELNNLSDAIVGLPGITGLSTEQRKRLTIAVELVANPSIIFMDEPTSGLDARAAAIVMRTVRNTVDTGRTVVCTIHQPSIDIFEAFDELLLLKRGGQVIYSGKLGRNSQKMVEYFEAIPGVPKIKDKYNPATWMLEVSSVAAEVRLKMDFAEYYKTSDLNMQNKVLVNQLSQPEPGTSDLYFPTEYSQSTVGQFKACLWKQWLTYWRSPDYNLVRFSFTLLVALLLGSIFWRIGTNMGDSTTLRMVIGSMYTAVMFVGINNCSTVQPIVSIERTVFYRERAAGMYSAMPYAIAQVVIEIPYVFVQTTYYTLIVYAMMSFQWTAAKFFWFFFISYFSFLYFTYYGMMTVSISPNHEVASIFAAAFYSLFNLFSGFFIPRPRIPRWWIWYYWICPLAWTVYGLIVTQYGDLQDPITVPGESNQTISYYITHHFGYHRDFMPVVAPVLVLFAVFFAFMYAVCIKKLNFQQR

SEQ ID NO: 68504 - protein, 62 aa, Zea Mays
MRSLFLPVIMCFWRLWIMGIKGLEVGLDVGLGFDLEFSFLQIGRFDSFCSCQFSVVLVASKK

SEQ ID NO: 68505 - protein, 245 aa, Zea Mays
MFFDRVFITHLCHLPDVFYCLGSSRIWNETWLSGFFYKPCNYELFVKQSLNMEMAIVMARDGGMDWIIHLDTDELLYPGGAAEYSVRRLLAEVPRDVDMVIFPNYESSVEHDNIKDPFSEVSMFKRNYDHLPKDTYFGMYKEATRGNPNYFLTYGNGKSAARIQDHLRPNGAHRWHNYAKSPNEIKLEEAAVLHYTYTKFSDLTSRRDRCGCKPTKEDVKRCFMLDFDRAAFIIASTASEEEMLR

SEQ ID NO: 68506 - protein, 170 aa, Zea Mays
MAPPDSISTCSSLPLAAAPMSEPTPFPFAASPLPNPLVATASFLQHHLSRLASHLNVPRPALAAAAARTPGPQGASLSLSLAPDEVARALTGTPVFTVCNSSNEFVLVSDPATGLRSLGLLCFRSEDADALLSHVRTRQPVLGKGAKVVPITLDQVYMLKAEDEIGLNCF

SEQ ID NO: 68507 - protein, 324 aa, Zea Mays
MKHMTRQEYIAYLRRNSSGFSRGASKYRGVTRHHQHGRWQARIGRVAGNKDLYLGTFSTEEEAAEAYDIAAIKFRGLNAVTNFDMSRYDVKSILESSTLPVGGAARRLKDAVDHVEAGATIWRADMDGAVISQLAEAGMGGYASYGHHGWPTIAFQQPSPLSVHYPYGQPSRGWCKPEQDAAAAAAHSLQDLQQLHLGSAAHNFFQASSSSTVYNGGAGASGGYQGLGGGSSFLMPSSTVVAAADQGHSSTANQGSTCSYGDDHQEGKLIGYDAAMVATAAGGDPYAAARNGYQFSQGSGSTVSIARANGYANNWSSPFNNGMG

SEQ ID NO: 68508 - protein, 620 aa, Zea Mays
METLMVDRVHSSLRLFMYRNAIFLCERLCAQFPSETNVQLLATCYLHNNQPYAAYHVLKGKKLPESRYLFATSCFRMNLLREAEEILCPVNEPNMEVPSGATGHYLLGVIYRCTGRISAAAEQFTQALTLDPLLWAAYEELCILGIAEDTDECFSESTALRLQQEHTSTSTLVKSNFANENRVLSSSVSASFGDIIPKQIKQLHANNITEVSGYPHTSIMPPPLFRNVHAYQNTISGDAPTKQKANGVSQPLRRKYMDEARLKKVSGRLFNSDAMPRRSQRLKDTTTNSNTSQIGGNGTDHLSGKLRVNSSTQSKLCSTAIRSVQVRKGKPRATENFDEGSRYEVIDEMWTDNMSGTSSSVSTADGRSFEQDRAERILLQDSKVALGIRELLGLFRTLGEGFRLSCLFKCQEALEVYRKLPESQFNTGWVLCQVGKAYFELVDYLEADHYFELAHRLSPCTLDGMDIYSTVLYHLNEEMRLSYLAQELISIDRLSPQAWCAVGNCFALRKDHETALKNFQRSVQLDSRFAYAHTLCGHEYSALEDYENSIKFYRCALQVDERHYNAWYGLGVVYLRQEKFEFAEHHFRRAFQINPRSSVLMCYLGMALHSLKVDIIDRQQ

SEQ ID NO: 68509 - protein, 615 aa, Zea Mays
MAAALRLQRQSLAASPFLFSAHGLRTASSRSSSLRSIRVTSLHVRGNWVMASAVGYNVTMSAGVDTYTKSWEAPTATGVSFYPDYNNLYTVGCGVYVYVFGDNMTDIIGSCTSICTDNREIMESANTGSGACEGLGCCSIPIRGGQGFTLKLGRLNSTIPQFGEALSNVKIIFSQNYDFVTDDVYASWVVNTSNVHGMLLNIAITDQPSCASAQSQENKDTYACSSESICDDDLSPSGFNLPYRVTNLSLDDGLLMVTNMLNDTSSNNMERVVLVNYDGYNQNGFYSTDFYSTDEDVVDDIDECLIPNKCNGICHNVDGGFNCTSCPHGKEYDPKKKKCVMSAKQRILIFGIVIGLVCGLGSISFALGAIILTGKWKKGIQRRIRREYFKKNQGHGGHGTVYKGILSDQRVVAIKKSKIVEQIEIDQFINEVAILSQIIHRNVVKLFGCCLEDEVPLLVYEFISNGTLYDILHENIATKCLLSWDDRIRIATEASGALAYLHSAAAIPIFHRDVKSSNILLDDNFTVKVSDFGASRSLSLDETHVVTIVQGTFGYLDPEYYYTGSLTEKSDVYSFGVILVELLTRKKPIFINELGAKQNLSHYFIEGYRKGLSWK

SEQ ID NO: 68510 - protein, 230 aa, Zea Mays
MDIMQTSDSSHHGIVENSPYRIPYDRHAEGGQLGASWYFSRKEIEENSLSRRDGIDLKKESYLRKSYCTFLQDLGMRLKVPQVTIATAIVFCHRFFLRQSHAKNDRRTIATVCMFLAGKVEETPRPLKDVILLSYEIIHKKDPAAVQRIKQKEVYEQQKELILLGERVVLVTLGFDLNVNHPYKPLVEAIKIFKVAQNALAQVAWNFVNDGFSKSSFHQMARRSGGKSLM

SEQ ID NO: 68511 - protein, 464 aa, Zea Mays
MSPDVDAAVATAVAPGGGCGGDGEAGAGTSSSPASAANGRALVRWDQILPRRSLRVLLVEHDDSTRQVVTALLRKCGYRVAAVADGMKAWGVMRERAYAFDLVLTEVAMPSLSGIQLLSRIVAADECKNIPVVMMSSQDSIGTVLKCMQKGAVDFLVKPVRKNELRNLWQHVWRRHAMNCQTNGSENNAASNHISANVANGSKTGENSDEESDAQSFGSKRDTEIHSVEAVQDIRRDEVAGSSKNNELQNKSYDGVNTKVDVSKYTNGAPSGSEKNVRSKCLNGITSAKVAEQIMDNALRITDASSRRPTNLGNGLAMTEPAADRKCQSSVMENNAVTENNPGDKSKGAAIGHADSCPSEFMVTNLGKEHHLNGYKNQEFREKDIFNHSNSSAFSRYGNKRIEPSGEIQFFPSPCVIGQGHVNGKNPVFQPNGVLLPPNEHNTVRGKPPVASFKTNSSGIRRTN

SEQ ID NO: 68512 - protein, 977 aa, Zea Mays
MSQSFDINVLREEARSRWLKPSEVYYILQNHERFPITHEAPKKPPSGSLFLYNRRVNRYFRRDGHTWRRKKDGRTVGEAHERLKVGNVDSLSCYYAHGEQNPCFQRRCFWMLEPAYEHIVLVQYREVAEGRYYSSQLSNGPPEPLSSLGYPNAICGNQYHRSTSGTSEGSESHQSYSNLSSVTEVSSYSGNKEYNKNDGSLLSIPEVGHTCQQNQTGNGNSKNKSELNMALKKIAEQLSLGEDDDDDYIYSNQTHSMGGDNQIKQIRQEGTQKGLSRNIAPSWEDVLHSSSGLPTSSIYQQSDVKYQKKSEYQPPEILDSSDLRIQLSATKRFLLGPEASIDSPSLNSVLRNRVNSVTDTISAYDSRFESSLNPDWQTKTALTFQSNSQGSEITELFDHDHFEPYSREDTTISLGQTNKFNIREVSPEWAFSYEITKVIITGDFLCDPSNLCWAVMFGDNEVPVEIVQPGVLRCHTPLHSNGNLRICITSGNREVCSEFKDFEFRSKPTSSSFTDIAPSSRHLKSSEELLLLAKFARMLLSGNGNREVPDGDPQSGQCPKLKTNEELWDRLINELKVGCENPLSSVDWIVEQLLKSNLQQWLSVKLRGFNGTDFLSKQEQGIIHLISALGYEWALSPVLSAGVGLNFRDSNGWTALHWAAYFGREKMVAALLAAGASATAVTDPTAQDPVGKTAAFLASERGHTGLAGYLSEVSLTSYLASLTIEESDVSKGSAEVEAERAVEGISQRNAQRHGGTEDELSMKDSLAAVRNAAQAAARIQNAFRAFSFRKRQQKTARLRDVYGMTQEDIDELAAASRLYHQAHASSGQFYDRAAVSIQKKYKGWKGRKHFLNMRRNAVKIQAHVRGHQVRKKYRTIVSTVSVLEKVILRWRRKGHGLRGFRAEQQPMVEAIEEDDEEDDDFDDDEAVKVFRRQKVDQAVKEAVSRVLSMVDSTEARMQYRRMLEEFRQATNWKDQMK

SEQ ID NO: 68513 - protein, 74 aa, Zea Mays
MIVPAGAINPQVACLGNTRYLSRVAGTGTGLTLISRVRVYNLCIRGFKTRCHPYSSGTTSLRAFTLLLARYACI

SEQ ID NO: 68514 - protein, 126 aa, Zea Mays
MVSIYITFVQFHRPLNLHDSEPLSSYVNVDVDCLICMLLCPLVIASQCSSKIWADKPVSSLTYCSFDPLKLPLSIMIISAPIVCLQFSLKYLFIQKLGPMNLINSEHVMALRNKCSFYNLSFMFIS

SEQ ID NO: 68515 - protein, 754 aa, Zea Mays
MDARKQIEREMERFKVCEKETKTKAFSKEGLGQQPKTDPKEKAKAETRDWLNNVVSDLESQIDNFEAEIEGLSIKKGKQRPPRLVHLEKSITRHKAHIKKLESILRLLDNDELSPEQVNDVKDFLDDYVERNQEDFDEFSDVEDLYSTLPMEKVEALEDMVSLAPSSLVKPTVSTAPSQSTSQDQTEDTASQESNSESVPQTPPPKGGNSGPSIPAVPIAVSTGSAAISVLAETISSPVRPIVPTTVATILSSAIPRSAPENTSTVTSIPANLSITLKDDESMSFPPRRPSPAITEIGIGRGIARGTTSQALGTAPITIGPVPGNGSVSALPGINDLSKRNILNTDEKINSGGLSQQLVMPLGSKVQPQQVPRTNDAISSESANTNESPILGGRVFSPPVVSGVQWRPLGAAAFQNQSEISHFRGRPEISADHREKYIQRLQQVQQQGGSLLNVSHITGINQKQFPTQQPNPLLQQFNSQSSSISSQVNLGVQGTDAGHIKSEEEEQLLAEDGVESSATTGANKQTSEDDTKIPYSNPSAPAAESNQLPRDTDPSPGQPLQPGMSSSGVGVIGRRSVSDLGAIGDNLTGTSASSGHDQLYNLQMLEAAFHKLPQPKDSERAKTYIPRHPAVTPASYPQVQPSIVSHPSFWERIGSDTLATDMLFFAFYYQQNTYQQYMAARELKKQSWRFHRRYNTWFQRHVEPQVTTDEYERGSYVYFDFHVTEDGSGWCQRIKNDFTFEYNFLEDELSVQTN

SEQ ID NO: 68516 - protein, 577 aa, Zea Mays
MAADATASASSSSAAYLPTSRLDIQAAVAKAAELRALHAALLQGGSSSGGAAAAASNAGAYASASRSPAVIRLPPAASPAPAPLATAAEDYPVFAPTYDEEHLGGTNYIRQDNRSLSENWSGIGLDHDHDGLEDEVAFSDFDNRNTFSSSNSELRFSSSNEHLRNRKACRNHPSLLPPALSADSLLRSVSRMTDSTEFKAVTTCNTCKPATISRDDTEAADARSLKNLNSTAPLSNSRTRRNGPHILSWLLPKSKRKPKPDVSPNTVECENMSQLLKDWGVFSLDSLRKEVVEANEHRDAALQEVSEMKLSLGELTAKLVSLEAYCSELKKALKQATSAKNMQSHSKRSARPVSGSRDSFLPVSHEVMVEGFLQIVSEARLSIKQFCKITLSDKHPKLVLYHLEALMNQAMYQDFENCTFQKNGSPRCLDPKQEQQESFASFVALRNLSWNEVLKKGTKHHCEDLGRFCDQKMSCVVSILNWSWPWAEQLLQCFFVASKCVWLLHLLAFSFVPPLTILRVEEDRAFDQTYMEDVLLDKQRSRNGPPPSSSQVKLMVTPGFYVQDRLLKCRVLCRYSG

SEQ ID NO: 68517 - protein, 419 aa, Zea Mays
MASTPGVSAILFDALAKANINVRAIAQGCSEYNITVVLKQEDCVRALRAAHSRFFLSKTTLAVGIIGPGLIGRTLLNQLKDQVAALKENMNIDLRVIGITGSSTMLLSDTGIDLTQWKQLLKKEAEPADIDSFVHHLSDNHVFPNKVLVDCTADTSVASHYYNWLKKGIHVITPNKKANSGPLDQYLKLRTLQRASYTHYFYEATVGAGLPIISTLRGLLETGDKILRIEGIFSGTLSYIFNNFEGTRAFSDVVAEAKEAGYTEPDPRDDLSGTDVARKVIILARESGLRLELSDIPVKSLVPETLAACSSADEFMQKLPSFDEDWARQRSDADAADEVLRYVGVVDTVNKRGQVELRRYKRDHPFAQLSGSDNIIAFTTSRYKEQPLIVRGPGAGAEVTAGGVFCDILRLASYLGAPS

SEQ ID NO: 68518 - protein, 869 aa, Zea Mays
MIDDEESQGIKKVHFRDSFSQHPIVTYKRRRQQKPQTQQQLRQPPPSLQQHPEPQLQVKLEPKTEDVPEQQFPILRARDIGWEHAVDLDGNKRRWQCKFCSLCRSGGVTTLKAHLIDDSCPNVPKEISKKVSNFIEEKRATRLLLNNYVFNVDEDFNTILQEGTVEYVNEQQPSRKATYVQTLSKCAINEVHNYPAVLRDSAWEHSLIYEKENGHWKCKWCSIEGDHGLTRLMWHLVGWQNRPQCPNIPKDVAEKMKDQMMSKKEQKARSGLFDGNGCCEVLCSSNSSQLDQNHLTARIHDRCSSQAFDHANSELKGCNMLSNTILSQQSSNPQVHHEDPQVCHEQERKEVATSSEPGCEQGQRMQWQSQNKPMMEGPHDNGLCGDTNQLEEQKSGFGISDCWRYVLDGQMHLPDVQEGAGIGTCIRDALLYGCAEFGTVPDKMEMDCDKTVDANTAKCQNILKDVLRSENFALLCSVLCRTVHQDGERTRYFDFGVIDSRMKNGNYGPEPELFVHDLKLLWEDLKVAGQDIVHLANNLSSLTEDSYEKLVGRERGSDDDELNEAVVARSEPKNLVQPNASVPLTSQGFNQLLDQPGPSDPSVVYKDSICNRCGKVAGAGSVLKCYRCMLPCHISCIEATGSPISTGRWCCKNCSAGTKEPVEGDMVLAHGNPNCLHESCVVCDRLAACRSPKCDNSRALVISSVDPEIDTCYSCKICGGTEEDEKRFLICGNVLCRYMYYHIGCLKSMQISTSVERGSPCWYCPSCLCRVCLCDKDDDLTILCDGCDEAYHIYCITPRHTSIPKGQWYCSSCSVERAEEGMRQYERRTLKLHRKEDAGLQSWNFDGVDLLLSAAEQLRIDEQLETRTD

SEQ ID NO: 68519 - protein, 73 aa, Zea Mays
MSSASSSAAAANAGEGSGGAEEGVEITYVSYGGEQHLPLVMSLVDEELSEPYSIFTYRYFVYLWPQLTFLQLS

SEQ ID NO: 68520 - protein, 129 aa, Zea Mays
MSFLRPEIAYIWRSVAPSRPIGLICIAPPNTIGKEEPERGSVWERGRRIGEGRRGKKRSAPYRFRNRVRKTHPIPAEASVESLGGLGHLLRLNCLPEYQTRCGATVRRGLLVWIDLDEVRSQETGRPIW

SEQ ID NO: 68521 - protein, 1384 aa, Zea Mays
MDASTAGDGDTNTLKRPCKTSPPEGETDKYKRQKRECQDFSPRRYQLDVYEVATRHNTIAMLDTGAGKTMIAVMLIKHFGKINKANNDRKLIIFLAPTVQLVTQQCEVIKSYTDFEVEHYHGAKGVDQWKAHSWQQQLLKYQVMVMTPQVLLDALRQAFLILDMVSLMIFDECHHATGNHPYTRIMKEFYHGSEHKPNVFGMTASPIIRKGVSSDLDCKNQLSELENILDSKIHSVVDREEIELCVPSAKEVNRYYEPRTVSFDDLSEELEILCSKYDGLIIQLHNRSTNQYKDADEITKESRKRLSNSLAKICYCLEDAGLLCASEATKICIERGQRKGWLKGGSDTTDQQSGQNGPILFAEISMLHMEFFQEVLDIIGKRVQQQQGIDALLNSERGCVEAKNMGYISPKLYELMQVFLSFSDPDNVRCLVFVDRKISARVIERTMKKIGQLSCFRVSFLTGGSSSVDALTPKMQKDTLDSFRSGKVNLLFTTDVAEEGIHIPDCSCVIRFDLPRTTRSYVQSRGRARQRDSQYILMIEQGNVKQDDLISGIMRSKASMTGIASNREPEDSHPSFLPTEEINEYHISKTGAKITTDSSISVLNQYCDKLPKDKYYTPRPKFQFTHYGDGYECTVTLPSSAMFQLLVGQKARNMQKAKQLVCLDACKRLHQLGALDDHLSPSVEEPPPEISSKSSISTPGAGLGTTKRKELHGTTKVLSMSGSWGSDRSVTKLQGYKLNFVCDQVGQKYSAFVLLIDASIAKEAATLDIDLYLHDKMVKASVSPCGPLELDAWQMEQTKLFQALLFNSLFGKLFIGSKASKTPREFILKKDDVFLWNKENMYLLLPVDSTLDSHKSVCINWSVIDVVATAVGFMRSIYSDGKCNLTDKLNYEKNGEDLIHLANKSCKGNDLKNMVVLAIHTGKIYTIVVVSDLCANSKFDGTTDKKEAKFRTFAEYFEKKYSIFLCHPLQPLLVLKPTHNPHNLLSSKNRDEDNVVENKNRANSLVHMPPELLIPLDLPIDVLRVFYLFPSLMHRLESLMLASQLRSEIAYRDSDISSFVILEAMTTLRCCEDFSMERLELLGDSVLKYAVSAHLFMTFLNKHEGQLSSRRQETICNATLYRLGIERRIQGYIRDAAFDPRRWLAPGQLSRRPCPCECPVNSEVVTEDIHRIDDKSIIIGKACDKGHRWICSKTISDCVEALIGAYYVEGGLKAAFAVLKWFQIETEIEEELIMEALSSASVRNYLPKVDVVELLEAKLGYTFQMKGLLIEALTHSSQQESGATYCYQRLEFLGDAVLDILITRHLFLSHKDTDEGELTDLRSASVNNENFAQVAVKHNLHQFLQHSSGFLQDQITEYVNSLESSSMDRASLLSSGPCRGPKWL

SEQ ID NO: 68522 - protein, 112 aa, Zea Mays
MPQNSFVIATKTVSAEVYVFDYSKHPSKPPLDGACNPDLRLKGHNSEGYGLSWSIFKEGHLLSGSDDAQICLWDIKANSRNKSLDALQIFKIGKLYFLSLMSTSRKTICICH

SEQ ID NO: 68523 - protein, 83 aa, Zea Mays
MASCGEEMEAVFVLIRYRPRLLSVWVAGLGPIGVVRVRHDGVWRGDTGRFTIIVDFGFKDILKTMVPNRRLTMACFGLSPAIP

SEQ ID NO: 68524 - protein, 115 aa, Zea Mays
MLEKDRISYFYDGDVGNVYFGPNHPMKPHRLCMTHHLVLSYGLHQKMEIYRPHKAYPIELAQFHSADYVEFLHRITPDSQHLYASELTRYNLGEDCPVFDNLFEFCQIYAGGTLG

SEQ ID NO: 68525 - protein, 94 aa, Zea Mays
MKREREGKTPCTDIILLGKVSGPLSSVWKEWVKWCVEFGIEANAIIAVPYDWRLPPSMLEERDLYFHKLKFVTLASTCYEATKCYTSVSRISKS

SEQ ID NO: 68526 - protein, 96 aa, Zea Mays
MSCLVVRRIVSNFVLLEGSCVGEKFKKAYEGRIEQLGDKSFWPKVEMANEVGAPLGRRGVGRQRKNRIKGCLEGGRGKKACANETVKQWKAKEAAT

SEQ ID NO: 68527 - protein, 338 aa, Zea Mays
MEPAAEDAAAAAPDSWETADIDGPMSRLILSARRVSSSPDFADDQDPPQPPPTLQPQGAPSAPSDAREDVVAQVDQFLREALEKPRERLSVLRMEQEILKFIHDPSRTEYEFNGLPTSYLRLAAHRLAQHYFLQSIAIPDNSLPDGTGSRIILRKTTFDCRLPAVRLADIPVNLPQEDISVAKVAIKQRPQKNLHGMNSSSAHSSRDNLQKSVEERKEEYNKARARIFNNSNSSTATDERSAEEVTLPSTLHRSTSLELNSSNRIGQGAEITLERSLTTTSASSRSNRSKIDKEPAVNRNKQNNRVAIFRDRESERKDPDYDRSYDRLRCWRSTSCPR

SEQ ID NO: 68528 - protein, 652 aa, Zea Mays
MLVKHLEHKNVLKQPDMNLDIIEVTSRLAGHSKAQSSTALMASISDMVRHMGKSMQSLASDAGPGDNMVKWNSRYGKAVDECLVQLSRKVGDAGPILDTLAVVLENISSSMIVARSTIFAAYRTAQIVASLPNLSHQSKAFPEALFHQLLLAMVYPDCGTHLGAHRIFSVVLVPSAVAPCSFSDTSRTRKIDLRRTLSRTTSVFSSSAALFGKLKRDMLSFRESPLHDNTKLLPISEDADEISANDAKLFKSQTIQRMASTKDISLPSSTDASTLSEQTPNQEKDAVTLMLSVRQANLLLSSLWTQALSPENVPRNYEAISHTYSLMLLFSRAKGSGADVLVGSFQLAFSLRSVSLQAGFLPPSRRRSLFTLATSMLVFFSKAFNVPALIPVVKHVLTESTVDPFLCLIEDCRLQALDSAAQSCKLYGSKEDDDQALKSLSNIDMNEHQSKETSVSLILDSLEDLSESELSTIRKQLIEEFSADDICLGSHFTETPSKSAAQNGKLHHKSMEVIPFGFVFEDDTLVEASDSLVEPHLRHLPCNSVLDVDRLLNSVLETSQHVGRMSVSTDQDLPFKEVANQCEALLIGKQQKLSICMSVREKKDGESSIEKSSQQDPQAYTFLCTADEQWHLNSCKLPVLCPYDRFLATSGC

SEQ ID NO: 68529 - protein, 516 aa, Zea Mays
MTMDVHGRTGHVARPCTRIKGQRPVAAYGLGSKRVAAGAPQAKARCHLGRCCLLDGRFMMRLKLPNGVTTSEQTRYLASVIEAYGADGCADVTTRQNWQIRGVTLPDVPAILDGLRAVGLTSLQSGMDNVRNPVGNPLAGVDPHEIVDTRPYTNLLSSYVTNNSQGNPTITNLPRKWNVCVIGSHDLYEHPHINDLAYMPAVKDGEFGFNLLVGGFISPKRWAEALPLDAWVAGDDVVPVCKAILEAYRDLGSRGNRQKTRMMWLIDELGMEVFRSEVEKRMPNGVLERAAPEDLVDKRWERRDYLGVHPQKQEGLSYVGLHVPVGRLQAADMFELARLADEYGTGELRLTVEQNIVLPNVSNERLDALLAEPLLQEQRLSPRPSMLLRGLVACTGNQFCGQAIIETKARALQVAREVEKRVAVPRPVRMHWTGCPNSCGQVQVADIGFMGCLTKDSDGKIVEAADIFVGGRVGSDSHLADVYRKSVPCKDLVPIVADLLVERFGAVPREREEDEE

SEQ ID NO: 68530 - protein, 540 aa, Zea Mays
MRLWCIFLLPLLCQLAGVRSEDYSDVTVIVRGSETIASTSGEFVCATIDWWPPEKCNYDQCPWGRASVLNLDLTNPLLAKAIQAFSPLRIRVGGSLQDQVLYGTPNLGLPCDPFTKVSSGLFEFSQGCITLERWDDINDLFLNTGAVVTFGLNALQGRHQIRKGVWGGPWNSSNAREFIEYTASKNYPIDSWEFGNELSGSGVGASVAAEQYGKDLVVLQTIVNELYGDSSKPLVVAPGGFYDQKWFAQLLEASGPNVLNAVTHHIYNLGAGDDPQVPNRILSPQYLSRTSDIFRGLQLTIQRHGPWSAPWVGESGGAYNSGSRLVSNTFLNSFWYLDQLGQSAKYDTKVYCRQTLIGGNYGLLDTDTFVPNPDYYSALLWHRLMGTGVLSLDISGSPYLRPYAHCAKQKGGIALVLLNLHRTMGFMVSVRNDINVNLAEGQGIRRDNAFVHGLKRTVSWVGSKASDGFSKREEYHLSAQDGNPFARTMLLNGVPLELTEDGDIPPLYPVEVSANSPIYVAPLTIAFVVFPDFEAEACGR

SEQ ID NO: 68531 - protein, 474 aa, Zea Mays
MAPVSLPPGFRFHPTDEELIIYYLKRKINGRQIELEIIPEVDLYKCEPWDLPEKSFLPSKDLEWYFFSPRDRKYPNGSRTNRATKSGYWKATGKDRKVNSHRRAVGMKKTLVYYRGRAPHGSRTDWVMHEYRLDERECETDTGLQDAYALCRVFKKTAPGPKIIEHYGAVHHPIEHPQWMAEAGSVDRHSPTLDLSSDARGDDFESSSFSFPTEAPSMDSMHGMQMSAPHEDGKWMQFLSEDAFNATNNPFFMNPPSSSSFPCLPSKVDVALECARIQHRLSLPPLEVEDFPQDVSLDTKASVLRSNPNEVDILQEFLSVASASQELINGATSSCYAAELWPSGAGTSSTSTHYVNELSSLVELGVKAKEEADNFYYMDCIVGTSVGFSSKSSVQVDEQAVRLVEIADIEGLKQEEKRQVENLRGVRLHNNDLGEIVVQGDESNPTDCITQYPISDYSADNLDCRRSRSPGRSH

SEQ ID NO: 68532 - protein, 62 aa, Zea Mays
MLLVLCSLLRSGQGEVLLPLMEGPRVTSTVTPSRGEGEEKRRDRREEKKLTDGAWTWTLSAA

SEQ ID NO: 68533 - protein, 539 aa, Zea Mays
MDPSSSGSGGNSLPSVGPDGQKRRVCYYYDPDVGNYYYGQGHPMKPHRIRMTHSLLARYGLLNQMHVYRPSLASQRDLCRFHADDYIKFLRSVTPDTQQEQTRLLKRFNVGEDCPVFDGLYSFCQTYAGASVGGAFRLNHGHDIAINWSGGLHHAKKSEASGYCYVNDIVLAILELLKYHERVLYVDIDIHHGDGVEEAFYTTDRVMTVSFHKFGDYFPGTGDIRDIGHSKGKYYSLNAPLDDGIDDESYQSLFKPIMSKVMEVFRPGAVVLQCGADSLSGDRLGCFNLSIRGHAECVRYMRSFNVPLLLLGGGGYTIRNVARCWCYETGVALGQELEDKMPANEYYGYFAPYYTLHVTPSNMENKNTRHQLDDIRSKLLDNLRKLQHAPSVQFQERVPDTEVPDPDKDQDDPDERHDPDSDTEVDDNKAVEASARRSILGMKVKREFGENDTKVQVGMEVKREFGGENDTKVQVGMKVKRKFGENDTKVQDGGRVASEHRVLEPKAEDNGFSIQAPSRMVVQRGGSFVAQVLVLWSGL

SEQ ID NO: 68534 - protein, 264 aa, Zea Mays
MAASVTVENLNPKVLKCEYAVRGEIVIHAQRLQQQLQTQPGSLPFDEILYCNIGNPQSLGQQPVTFFREVLALCDHPCLLEKEETKSLFSADAISRAKQILATIPGRATGAYSHSQGIKGLRDAIAAGIMSRDGFPANADDIFITDGASPGVHMMMQLLIRNEKDGILCPIPQYPLYSASIALHGGALVPYYLNEKTGWGLEISDLKMQLENARSKGIDVRALVVINPGNPTGQVCTNHFSSLVKEHLCLLRYSISYAQHTLYN

SEQ ID NO: 68535 - protein, 1461 aa, Zea Mays
MRIAIAMDHRQDAGDGEEERQQQLGDLETDKEPVQKQGQLSPSSSWRAAAAASIRESLSRSLSSLSHQQEEKDDDEVELRWAAVGRLPTMDRLHTSLQLHAGQRQVVDVRRLGAAERRMVVDALVANIHRDNLRLLRKQRQRMDRVGVRPPTVEVRWRDVRVEAECQVVHGKPLPTIWNAVVSGLSREARVRILHGVSGVAKPSRLTLLLGPPGCGKTTLLKALAGKLRATGLKVTGEIEYNGVELNNGFVPEKTAAYIDQYDLHVPEMTVRETIDFSARFQGVGNRAEIMKEVIRREKEAGITPDPDVDTYMKAISVEGLERSMQTDYIMKIMGLDICADIMVGDAMRRGISGGEKKRLTTGEMIVGPSKALFMDEISTGLDSSTTFQIVSCLQQLAHISESTILVSLLQPTPETYELFDDIILMDEGKIVYHGPKSCIMGFFESCGFKCPDRKGAADFLQEVLSKKDQQQYWSHSEETYNFVTIDQLCDKFRVSQIGQNLAKEISKPCDKSEGLKNALSCSIYSLSKWELLKACSARELLLMKRNAFIYIGKSVQLALVAAITGTVFLRTHMGVDIVLANYYMGSLFYALLLLMVNGFPELSMAVIRLPVFYKQRDYYFYPAWAYAVPAFILKVPISLVESIVWTSLSYFLIGYTPEASRFFRHLLILFLIHTGALSMFRCVASYCQTMVASIVGGTMALLLILLFGGFIIPRSSMPNWLEWGFWLSPLSYAEIGLAETEFLAPRWLKLTASGVTLGRRVLLDRGLNFSVNFYWISIGALIGFIFLCNIGFAIGLTIKKPPGTSRAIISYDKLSRLNRRDQCVLVDTKDGINKQQENSSARSGTGRVVLPFVPLAVSFKDVNYYVDTPAEMREKGYMEKKLQLLHNITGAFQPGVLSALMGVTGAGKTTLLDVLAGRKTGGVIEGDIRVGGYPKVQETFARISGYCEQTDIHSPQITVGESVAYSAWLRLPTEIDSKTRDEFVNQVLETIELTEIRDALVGMPGINGLSTEQRKRLTIAVELVSNPSVIFMDEPTSGLDARAAAIVMRAVKNVANTGRTVVCTIHQPSIEIFEAFDELMLMKRGGQLIYAGPLGYRSSILIKYFQAIPGVPKIKDNYNPSTWMLEVTSTSLEAQLGLDFAQVYMDSSMYKEKDELVSRLSIPTLGSSNLHFPTRYPQKFREQFKACIWKQFLSYWRTPSYNLVRIVFILVASIAYGALYWQQGNINNIHEQQSLFNILGCMYGTTIFSGINNCQSVMPFVSIERSVVYRERFAGMYSPWAYSLAQVTMEIPYVLVQIVLFMLIAYPMIGYAWEAAKFFWLLYTMFCTLLYFLYLGMLMVSVTPNIQVASILTSLFYTIQNLMSGFIVPGPQIPKWWLWLYYTSPMSWTLNVFFTTQFGYEDQKKIDVFGETKSVAAFLKDYFGFKRELLPLSAIVLAAFPIFFAALFGYSISKLNFQRR

SEQ ID NO: 68536 - protein, 1141 aa, Zea Mays
MDPDDESAAQRKAADLHLPRVTEPASAPARTFCAAQRVLSYGDGPVASASAQRCASFPQRHGHGHGHGEAALAPAASFAAWVDGGPTPPSAVAAALERAMSQYDGAGDALPEFVGAGGGEGIFRVPLRAAVHPARPPPLEVRPHPLRETQVGAFLRTLVCDPRRRKLWAGAESGVRVWCLDEVFRGWWPGAGPRRRGDEEAAPFRDSVPVPPALCAAVDSANGLVWTGHREGRIRAWRVDHAAPAGGDPTGSAAMFKEAFAWQAFSRTPVLAIVVTPYGSEGGAIKAWPWEALAKCLSSTPEEIHEAASLVEKSYIDLRNHATVGNMCSLPTADVKHMLADHCRLKVWSVTSMTFALWDAKTRELLKVFGIDGQVDLARPEAPVMPEQFIEEEIKAKPTKKEKLQGSLSFFRKSRNALMGAADAVRRVATKGTFVEDNRRTEAVAQAMNGTIWSGCTDGSIIVWDGNGNRLQEFHYHSSSVQCIEALGERIWVGYASGTIQVMDVEGNLQAGWIGHSCPVISMAVGDSYIFSLAHHGGIRGWSLSSPSPLDDILRYELASRELSYTRLENLKILVGTWNVAQEKACPEALKSWLGGAFFDVGLVVVGLQEVEMGAGVLAMAAAKESVGLEGSTNGQWWIDSIGKTLDEGISFHRVGSRQLAGLLIAAWARNDLKPHVGDVDAAAVPCGFGRAIGNKGGVGLRIRVFDRRICFVNNHFAAHQENVSRRNADFDHIYRTMTFNKPHGSTASATSVQLHKAVSANENQADEDRPELAEADMVVFLGDFNYRLDGITYDEARDMVSQRSFDWLRERDQLRAEMEAGNVFQGMREGRIKFPPTYKFQRHQMGLSGYDSGEKKRIPAWCDRILYRDSRSVSMPECSLECPVVAAITAYEACMDVTDSDHKPVRCTFSVDIARVDELIRRQEYGKIVESNKRVHSLLRELHFVPDTIVSTNNIILENQEDVILRITNNCETSKAAFEILCEGQSIRKQDGTKSEPVIRASFGFPLWLEVQPSSGLIGPGDTTEVAVHHEDFFTQEEFVDGVQQSWWCETTRDIEVVLSVNVTGVASTEAATHRITVRHCCPAPPAPPSANPRGPITDSPSDAVPGPKSSQSNHLLRSDFANFGSSEVRDLCGVRKRNL

SEQ ID NO: 68537 - protein, 412 aa, Zea Mays
MKEQIMEPFFVFQVFCVALWCLDAYWYYSLFTLFMLFLFESTMAKNRLKTLTELRRVKVDSQIVLTYRCGKWVKVPGTELLPGDIVSIGRSTSGEDRSVPADMLLLAGSAIVNEAILTGESTPQWKVSIAGRGPDDMLSIRRDKNHILFGGTKVLQHTADKSVNLRSPDGGCLAFVLRTGFETSQGKLMRTILFSTERVTANNKESGLFILFLLFFAIIASGYVLVKGLEDPTRSRYKLLLSCSLIITSVIPPELPMELSIAVNTSLIALARHGIFCTEPFRIPFAGKVDICCFDKTGTLTSDDMEFQGIVTSEGDDLISDANKLPLRTQEVLSSCHALVFVDNKLVGDPLEKAAIKGIDWIYTSDEKAMSKKPGGQPVQIVHRYHFASHLKRMSVIVRIQQKFYAFIKVRI

SEQ ID NO: 68538 - protein, 73 aa, Zea Mays
MPSDILVVEFGKVQCPWAGHANLRGAEDRPRMIGPCVAGTLGVSLPHAVSDTALEFKSIYILSPANSSVCPCA

SEQ ID NO: 68539 - protein, 590 aa, Zea Mays
MQAVLLCKRASKPSDPSDYDPTTDTTMKVTPWNTKRLQEAIRNGADIHPGATHYRDNNSMYKLQAVPAKRRSIAKMLPASRGSICQPGRDPNCEFESKVVYRHLQDGDIVLVNRQPTLHKPSMMAHFVRVLPGEKTLRMHYANCSTYNADFDGDEMNVHVPQDEISRAEAMNIVDANKQYIGPRSGDAVRGLIQDHIVGAVLLTKPDTLLSREEYSQLVFGSCVPSSNCGSHHPAKVSAIEDYDTLELVHPAIWKPRPLWTGKQVITTILNHLTKGCPPFTVEQKGKIPKEYLKEDPSAQKEKEDPSARKEAHSAKKGKREDPSAQKEKDSSVNKEKQEKIQKQKQKDRSELVLYIHNNELIKGIIDKAQFGKYGIVHTVHELYGAYTAGILLSTFSRLFTLFLQLHGFTCGVDDLLLLPEKDKLRSKILSGSEVRSNEVHWKFTGADEDHKGDLVKLHMEVEKAVRSNGESDTATLDNDMKNALNGITTDVNKILFPDGLQKPFPGNCLSLMTTTGAKGGPVNMNQISSLLGQQELEGKRVPRMVSGKTLPCFPPWDISSRAGGFISDRFLTGLRPQEYYFHCMAGREG

SEQ ID NO: 68540 - protein, 92 aa, Zea Mays
MISVLHAKAICCIIVFLRKSPRVAFCGYTIPHPSEKKVNIRLQTTGDAAKDVLKDALQNLMIMCQHVRGTMDTAVVNHRAKNAAEEMDVDQN

SEQ ID NO: 68541 - protein, 200 aa, Zea Mays
MAFVFSLTLDQAEHYSSPILSFWMMAASTPWRRNLPLLCGGFGPERGGRPTRIRSISPPTRPNSRTLRRRKHSRRCTPSRHRKNNPHCRRCSSSPHPTSLIQSIDAALKSSSPPIAAPSQSTDLDVLHQWPGSRARMSRSTPRTRRIPPTRPRRVAAATATTTEATVTAAVTAARVAAATAVAAARAAARAATRPVARRH

SEQ ID NO: 68542 - protein, 876 aa, Zea Mays
MENPDAQAKAWAAEMRELAYDMEDSIDLFTHHVDHEPADTATTGVKRFFLRIIRKLKKLHYRHRFAQEIKQLHDLANESYRRRKRYRIEEGGSSLPHAEIDPRLEALYVEVEKLVGIQGPSQEIIGQLVGENAAERRRVVAVVGSGGSGKTTLAKQVYEKIRCQFSCAAFVSVSQKPNMNSLLWELLSQIGNHGGDLGMMAVGYCSDKQLIDRLRSHLEKQRYLVVIDDVWTNSAWETIQCALPKNAHASKIILTTRINSVGQFSCTPDEGFIYQMKPLCRNDSENLFLKRTLCDKDKFPAQLEGIKNEIIEKCDGLPLAIVTLASMLATKQRTREEWERALDSIHSTHKKDSSLEVMDKILSLSYRDLPHNMRNCLLYISTFPEDHTIYKDALVWRWMAEGFIAETQGFTLEQVAEGYFYEFVNRSLVQPITLRSRYEMRGEGGCRVHDIVLNFLISRAAEENFLTTLYGAQGVPSSDRRIRRLSVWDSPEHALAVSRATMNLSHLRSVRICNVGDWPVPAVLDLPVLRVLDLEGCRDLRIVDPDCILSLFHLRYLGFRSASGVVLPAQIGNLHHLQTIDLSGTGVTQLPESIVQLKRLMHLVGQRLIMPDGFGSMESLEELGTIDCCKCPAEGAPSDRVAFVGVETSDMETRRKSLMSSLCKLGGDNLRRVTIIDLAGGGDCFVESWHPPPRLLQKFIHISQQQHFSRFPEWISSCLCDLTHLDIKAEKMEREHLSVLEHLPAIRYLYLFVKRVSEDGLVISHSAFRCLRRLEFCNLDGPGLMFAGGVPMLEWLRLGFDADRAQSTYGGLEVGIQRLSSLKHVVLIVCMVSEGGDDPAEQAVWSAINGQVEMLPNSPTVDIRFRRRSQLQASSE

SEQ ID NO: 68543 - protein, 87 aa, Zea Mays
MLAVRLLSLRRHRGSRRMLRLLLYCSSSDKLIMSILSLFCILIFFQSLALDYELLVSYSTLLFLLLLSESICSSINCFCFGIIEDLA

SEQ ID NO: 68544 - protein, 705 aa, Zea Mays
MGMAADATTAMTIDFLRARLLSERSVSRAAKERADHLAKRSIVTEPVAAVQVVELEEQLRTVTAQRRKAERAAAEVLAILDSQGFGRLSDAADDSGSEYEADTGDPNAVERDGGGGNAAEDALSGSELGAPAAAAAASAAQAGGLSWRGRAASPECERRRPQHQQHKGRQLRQRHGHGHGHRRGYFYCRAADSSPKYHPGQSCRKIKRKELRSQTEEEEGNDNAVESTEDGQERSDCTVCTDQPADVDGEVNQDGHGSSSNGRGEDRDDLAMVYEKDGEMERVLEKQAELIGQFEAQENAQREWEEKFSLSRDSDNVNLLNNKLNQAENACGRRETARVVDKEVVCEQARSSDNNFHCINDPSECLPNGPVSELPQNVAKDSVTEHRKFDGFGHDCVVTAAAVISSHGELQVRKDVLTTKSYPEGSGNNLGKSALPPQGSCGSRLNAGHRNGQGDESSDSGSSYHVNARSSEQYINTSSVGSQLSDTPKSEVSEWSSSCFHNHTDNQLDTQLHQSSNKDVGGVLEALRRAKMSLRAKLSWPSLASKNILALEAPDDLPVNGMELSLCRTAHVSQEIFALPTPTDYLNKVLPHDDVKVPIGPAGLFRLPIDSFPRDEMTTRDGYGSWFSLTSVSPPYVSPSYHADHIMPALSLSQYGSGLSLNPYYDPHSSMLLSMPTAGGRSVPVSDFRIGDGSFLREVPRPDNY

SEQ ID NO: 68545 - protein, 523 aa, Zea Mays
MSHLDAASLLAPSPPLAKPHPRSRFLCLISSMLAVLGASLAGLLLFALHPAPNPVPNYASLFLSLGSNDTAASHLRALTLHPHVAGTKANALTARYVFDALSALSFPTHITPYSVLLSYPVHRSLSLSAPGRGVVTSFSLKQETYPNDPYAAAAAETIPTFYAYSASGSVSAEAVYANYGREEDFSYLASRGVDVAGKVAFARYGRIHCEDIAHNARAAGAAAAVVYTDPLQYGGAPGEGWFPDSRWLPPSGVQVGSLFRGVGDPTTPMWASSEGCERVSLEEAMNTDDMPLIPALPVSAQDAMEIHRAMGGAVAPEDWQGREDGPVYRLGPGPAVLNLTYLGNDSMATIENVFAIIEGAEEPDRYVILGNHRDAWTFGASDPNSGTAAMIELAKRFSMLQKQGWRPRRTIIFCSWDAEEYGLTGSTEWVEENREMLYSRAVAYLNIDVSVVGPGFLPSTTPQLDELLQQVTKVVQDPDNSSQTVYDSWIKSSTPLRVSCCNLLIQQPTFYVVLRIQLVVTIK

SEQ ID NO: 68546 - protein, 827 aa, Zea Mays
MGTRPTVHFQVMGDPSMGAKQRTFIIDAARALDKAKMMRFDEKSGNFYCTELGRIASHFYLQYSSVETYNEMLRRHMSESELITMVAHSSEFENIVVREEEQDELEALARKACPLEIKGGPTDKHGKISILIQVYISRAPIDSSSLHSDAQYISQSLARIMRALFEICLRRGWSEMSSLLLQYCKAVDRKIWPHLHPLRQFDKDLSPQVLWKLEERNVDLDHLYEMEENEIGALIRFSHQGKLVKQYVGYFPYVNLSATVSPITRTVLKVDLHITPEFVWKDRYHGMSERWWIIVEDSENDTIYHSELFTLTKKMARGTPTKISFNVPIFEPHPPQYYIHAISDSWLHAETLFTVSFHNLTLPQTQITHTELLDLKPLPLSALGNKTYEDLYRFSHFNPIQTQAFHVLYHTDNNVLLGAPTGSGKTISAELAMLHLFSTQPDMKVVYIAPLKAIVRERMNDWRKRLVIQLGKKMVEMTGDFTPDLMALLSADIIISTPEKWDGISRNWHSRSYVMKVGLMILDEIHLLGADRGPILEVIVSRMRYISSQTERSIRFVGLSTALANARDLADWLGVTDDGLFNFKPSVRPVPLEVHIQGYPGKFYCPRMNSMNKPAYAAICTHSPNKPVLIFVSSRRQTRLTALDIIQLAASDEKPRQFLSIEDNSLDMVLSQVSDSNLRHTLQFGIGLHHAGLNDRDRSLVEELFSNNKIQVLVCTSTLAWGVNLPAHLVIIKGTEYYDGKTKRYIDYDITDILQMMGRAGRPQYDQHGKAVILVHEPKKSFYKKKLFLAPSATRRRRLFISPGLTYIADWLLIRPIMDWRILKQTH

SEQ ID NO: 68547 - protein, 784 aa, Zea Mays
MPASSVSGGSGPGGVSPDAIIEWLQDEMGYPSAPPAPDQLRKICRGNMIPVWSFLLRRVRSERTVATARRNILVHGVAARRAREGGAMGAGAGDAAAREAEARERDLAAEEAERLRGIVRRQRKELRARIAEVAREEAERKRVLGERSNARHKQVMLQAYEQQCDEAHKIFAEYQRRLHQFVNQARDVRRSSIGVAGATGALVDMQLQSDRDDLYPSTIKSNRLPEDLLETAGERSIRKACETLAADMIETIRSSFPAFEGCGINSSCQLDAEKLGIDLVGEIPTYVKLVALDSLKNPFMLLQSIITYTSRMKTLIHRETDKIDIRADAELLRYKYENEQVIDAASTDASSPLPYQVYGNGKTGSQLSTRGTYDQLLERQKEHVQQFLATEDALNKAAEAKALSQKLLQRLYGTADMAGNKKLPTGNTTQNVTNSRHLELDVWAKEREVAGLKASLSTLTSEVQRLYKLCAEWKEAEDSLKKKWKKIEEFDARRSELEFIYSALQRANMDSSAFWEQQPLSARGYASTTIIPACHAVVDMSTNSRDLIERELAAFSQSLDNSLCRLPATPQALLEAVGSNGVTGSEALAAAEKHAALLTARAGARDPSAVPSICRISAALQYNFGTEGTDSGLASVLNSLEFCLKPCGSEASILEDLSKSINLVHTRRNLVENDRVLLNRAHRAQQEYERVANYCLKLAGEQEKVVSERWLPELRNAVQEARRCFDDCQRVRGLVDEWYEQPAATIVDWVTIDGQSVGAWINLVKQLHMEISRRTLAMSSVGDD

SEQ ID NO: 68548 - protein, 338 aa, Zea Mays
MEALALFLGSGLFLKLMGVSPVSPMHRPAKLFLSLRALGAPANVIMLAVQGIFRGFKDTKTPVFYIGLGNLSAVALLPLLIYGFKLGITGAAISTVVSQYIITVLLLWSLSKRAVLLPPRIDQLEFGGYLKSGGMLLGRTLSILLTMTIGTSMAARQGPTAMAAHQICLQVWLAVSLLADALAVSAQALIASSYAILDYKKVQKTAMFALQIGVFSGLALAIGLYASFGNIARLFTSDPEVLTVVKSCALFVCASQPINALAFIFDGLHYGVSDFEYVAQATIVVGVTSSLVLLWAPSVFGLAGVWAGLTTLMGLRMAAGILRLLQKAGPWSFLHEEP

SEQ ID NO: 68549 - protein, 271 aa, Zea Mays
MALFGCSRIDTLCCPTCWAFLHSRVSKVAGEMANIGKEREFHASLQEFRGEDSDISEEATEIKDYIKSVRRLPKAKIQDLFQRKNMYAVTVGVGLMIFQQLGGINALGFYTSYIFSSAGFSGKLGTTLIGVIQIPITFFGALLMDRSGRRALLLVSSSGTFLGCFLTGLSFYFKVYYAAYSVGMGPVPWVIMSEIFSIDMKAIAGGFVTLASWIGSFAISYSFNFLMDWNPAGTFFLFSAASLVTVLFVAKLVPETKGRTLEEIQTLLKAT

SEQ ID NO: 68550 - protein, 366 aa, Zea Mays
MEDEENIEGELLLVESQLHDIQGQIKTLLDRQEELYERQAQLKALLEASKLTRNTTINTSSVAPEDWSGSFPWDLEADDTRFNIFGISSYRSNQREIINAVMSGRDVLVIMAAGGGKSLCYQLPAVLRDGIALVVSPLLSLIQDQVMGLSALGIPAYMLTSTTNKEVEKFIYKTLDKGEGELKILYVTPEKISKSKRFMSKLEKCHHAGRLSLIAIDEAHCCSQWGHDFRPDYKNLGILKIQFPSVPMIALTATATSKVQMDLMEMLHIPRCIKFVSTVNRPNLFYKVSEKSPVGKVVIDEITKFISESYPNNESGIIYCFSRKECEQVAKELRERGISADYYHADMDIVNREKIHMRSICYSSQP

SEQ ID NO: 68551 - protein, 385 aa, Zea Mays
MPDHNLQDIRNKVFPIKKINVDSPKALTTLPAKRKQRSISSLVVDTPSVVKQTGLTGKRTKAKRRAAASLATSPVNNGTMKLPSKSENGDQKTDKSCPSQSTKAATSANKTENQDQKKTKKISAKQSTRAATPAKKKQRNTDAQVSSKPSSEKRKNSKTADKDGLRKSSKVPRSTPKIHAVNEEQIKEKEGEPPTRKGEADNKVVIPGTSVREHSNNSNLKEKNDGTSPEPSPLKDKTATEDSYRGSLGSAKGLHGPVTTPVWFSLISLPNQKEDPQLPQLPKTYMRIKDGSLQISSIQRYIMKKLDLANENEVEIICHGEPICPSSTLRGLMELWHRRQPTEPVEASVGAPAEEFVMVLGYRCHRRHPYLAPGTTVAVPPELPS

SEQ ID NO: 68552 - protein, 492 aa, Zea Mays
MARAALRLGDRALALLVLVSVALLPLVSSDDGHKHCEGVVRGWADSSTGRVKDGDKLSLKDLLFFLHIPRTGGRTYFHCFLKKLYTNAQECPRSYDKLRFDPSHPDCKLVVSHDDYSLTSKLPRERTSVVTILRNPVDRVFSTYEFSVEVAARFLVHPNLTSAKLMTTRVLKKSRAVSTLDIWPWKYLVPWMREDLFSRRDARGIDKVHSSKKVNAYDVEDMVMPLHQYINDPVAHEIIHNGATFQITGLTNNSYFDGAHEVRHCARKHPDLGRIVLEVAKNRLDQMLYVGLTEDHEESARLFAHMVGAQVLLQSGTLSLDLKEDLHSETGFDLFGDGVCALPDQNEYSHPSMVEPGDEEASEHLNNTHGWQNNEALNSTSDEQGKGNMTVGKLMEAYETCIAKLRKSQSSRRKISLKKVEEANFSKEARKLVPEAILKQIISLNSLDMELYDHAKKIFTQEHLMLKAQQSMAGQHRQLAEQEGGGRKHDRI

SEQ ID NO: 68553 - protein, 698 aa, Zea Mays
MSLVVKLRYILKLLSAASWVVILPVTYAYTWKNPTGLARAIKSWLGDGQNQPSLYILAVVIYLAPNLLSATLFLFPVIRRALERSNLKVVTFIMWWSQPRLFVGRGMHEGAFSLFKYTMFWVLLLATKLVVSFYVEIKPLVQPTKDIMKEPIRTFKWHEFFPHANNNIGVVIALWAPIILVYFMDTQIWYAIFSTLIGGVYGACRRLGEIRTLGMLRSRFESLPKAFNQCLIPSDTSKRRGFRAAFSKPSKTSEDTREQEKIAARFAQIWNLIITSFREEDLIDDREKDLLLVPYCKDRDMDIIQWPPFLLASKIPIALDMAADSGGKDRDLKKRMKSDPYFTYAIKECYASFKNIIYELVIDSRERGYIQKIFDAVDEHIAEETLIKELNMSNLPTLSKKFIELLDLLESNNKEDHDQIIILFQDMLEVVTRDIMVDQLSELLELIHGANNKRSEGMTSLDQQDQLFTKAIDFPVKKTQAWNEKIKRLRLLLTVKESAMDVPTNLDARRRISFFANSLFMSMPDAPKVRQMLPFSVLTPYYKEDVLFSSQALAEQNEDGVSILFYLQKIYPDEWKNFLERVHCESEDQLHETEHSEEQLRLWASYRGQTLTRTVRGMMYYRQALVLQASLDMARDDDLMEGFRAADLLSESDESPLLTQCKAIADMKFTYVVSCQQYGIQKRSGDPHAQDILRLMTT

SEQ ID NO: 68554 - protein, 615 aa, Zea Mays
MMGPLLGLDPWRSGPGCQRPSIYRIGWQLLQGASWINYPCLSASTDSVRAFSTSPCVRKSTHCGHILFIQRAGFASPTPIQAQSWPIAMQNQDVVAIAKTGSGKTLGYLLPGFMHIKRLQNSTRNGPTVLVLAPTRELATQILDEAVKFGRSSRISCTCLYGGAPKGPQLRDLDRGVDVVVATPGRLNDILEMRKVSLKQVSYLVLDEADRMLDMGFEPQIRKIVKEIPHRRQTLMYTATWPKEVRRIADDLLVHPVQVTIGSVDSLVANSSITQHVEIITPSEKQRRLEQILRSQDSGSKILIFCTTKRMCDQLARTLTRQFGASAIHGDKSQSEREKVLNQFRSGRSPILVATDVAARGLDIKDIRVVINYDFPTGVEDYVHRIGRTGRAGATGVAYTFFCDQDSKYAADLIKILEGANQRVPRDLEDMASRGGGRGRKRNHWASRPDRGGSRSELDSRYSSRDGLASSGKSESGRGSRGRDDNGSRGRYDPGETDGRSRRSTRGRSRSRSKSDSRSRSPSPKKSRRHEGRRSRTKSRSRSRSRRNHGASHSKSRSPVASRRYEKTASGSARPNSGHAEHKSPPRSHSRDDHVNHSDHKDDPRANAAVQNGNN

SEQ ID NO: 68555 - protein, 92 aa, Zea Mays
MGRGKFKGKPTGRRNFSTPEEIAAGTSGRPRTFKKKEEEEEEEEEREESEEEESEDESDDKPKHKGTEGIIQIENPNLVKVKNIKAKEVDLG

SEQ ID NO: 68556 - protein, 82 aa, Zea Mays
MHPLVEPGPNLPGDVPGLGFVGGRVDPCVSCAGCPMSAPSDLNLAHVVRCHATRCCALRCPTRRDETGNVAGPATRLRGRYM

SEQ ID NO: 68557 - protein, 264 aa, Zea Mays
MAKARKQKGDGSGTGGGATVLHQKLCLSIDMENQLIYGYTEIKALLAENDTFALHADNMTIRSILVDGETVEFDYSPHWKNETDQPNWSSISCLNTVADAACSTYTSSLNREATPNLIVSSERSIKSMIEQQLDENSEKYEENSGRLEKHGGKTIQTSYDQIVNGCNGSAVEEGIENSAVEEGKKKEKEKEKEEKNGNEKSKENGNETENEKVKNIKLVHIDYILEKAETGIHFVGNVMHSSNQIRRAHCWFPCVDTATQRYLT

SEQ ID NO: 68558 - protein, 358 aa, Zea Mays
MAAAAVATVASPSPAASRRMLPSAAPSFLRLPRPTSRLRRATQVAAAGGEADVLPGPGAEGEAAVPGRLEEQRDEPLAGSQLDIGGLAFQGDVGGGFTGGGAGSGASGGGGDGNKMLDRGINTAIVLAASTYALTKLLTVDQDYWHGWTIFEILRYMPEHNWSAYEEALKANPVLAKMMISGVVYSLGDWIAQCYEGKPIFDFDRARMFRSGLVGFTLHGSLSHYYYHICEALFPFKDWWVVPAKVAFDQTVWSAIWNSIYFVVLGFLRLESPTTIYSELKSTFWPMLTAGWKLWPFAHLITYGVVPVEQRLLWVDCVELVWVTILSTYSNEKSEARNSDSTSTPDASKIAALETLES

SEQ ID NO: 68559 - protein, 67 aa, Zea Mays
MEGGAIKLFDSRSYDKGPFDTFLVGGDTAEVSDIKFSNDGKSMLLTTTNNHIYVLDAYGGDKGVALV

SEQ ID NO: 68560 - protein, 193 aa, Zea Mays
MPCLLFLLAPPPRPCLADSSKWLVAGCFAFAAIWKRDAEIMWVLLGAVGNSLLSLVLKKMLNHERPAPALRSDPGMPSSHAQSIFYAATVLALSLYYWLGTNYLTMILGPATLSLAAYLSWLRVSRGLHTLNQVMVGAVVGSAVGALWFVLWHWLVQEAFASSVLVRVAVILGSSAFCVSFVVYMIRHWLKDE

SEQ ID NO: 68561 - protein, 167 aa, Zea Mays
MEHCYVGQPISRAEAMPERRSRFWQMDAPPPPRAEVICPQPRRATRIPLTAVETLNKASPKMNGSDSTCDILDLILSKNDSDGDSSSQVGFLCGSPPIRADNPVIHDPQFGKRLPSFSPLGGSSYGKMPAVRVEVGSPSCGVSSSPKVRIEGFACGNSETHYAVTFV

SEQ ID NO: 68562 - protein, 369 aa, Zea Mays
MDPSSAGSGGNSLPSVGPDGQKRRVCYFYDPDVGNYYYGQGHPMKPHRIRMTHSLLARYGLLNQMQVYRPNPARDRDLCRFHADDYINFLRSVTPETQQDQIRLLKRFNVGEDCPVFDGLYSFCQTYAGASVGGAVKLNHGHDIAINWSGGLHHAKKCEASGFCYVNDIVLAILELLKHHETGVALGQEPEDKMPVNEYYEYFGPDYTLHVAPSNMENKNTRQQLDDIRSKLLDNLSKLRHAPSVHFQERVPDTEIPEQDEDQDDPDERHDPDSDMEVDDHKAVEESSRRSILGIKIKREFGENATRVQDGGRVASEHRGLEPMAEDIGSSKQAPADASAMAIDEPSNVKNEPESSTKLQGQAAAYHKP

SEQ ID NO: 68563 - protein, 211 aa, Zea Mays
MFVVGVNENSYDSKMNVVSNASCTTNCLAPLAKVVHEEFGIVEGLMTTVHATTATQKTVDGPSMKDWRGGRGAGQNIIPSSTGAAKAVGKVLPELNGKLTGMAFRVPTPNVSVVDLTCRIEKNASYDDVKAAIKAASEGALKGILGYTDEDVVSNDFVGDSRSSIFDAKAGIGLSSSFMKLVSWYDNEWGYSNRVLDLIAHMALVSAAAKL

SEQ ID NO: 68564 - protein, 122 aa, Zea Mays
MRSSSHAASPRATTYHRATTCHRAATFPLPLTGEPPLSPSLSLSSGTPPFVSPRGRAAPPASRLPRGRTRRRLLRAARQGRQRRPRLPRASRRRARPLLRLPCDAAPKPSLPPFSPSLSLSS

SEQ ID NO: 68565 - protein, 51 aa, Zea Mays
MFYMSLGFSFFQVRSIIVYMSTFTLISCSLFLHSYYLLCTFLYLSKLAYYL

SEQ ID NO: 68566 - protein, 147 aa, Zea Mays
MAPLPSSTKSPMAAHCVFVDDVLVRISLCASLLPCARTLLPSSALSISSRSVSSSRCAPLQARQPPFPCHRTPNAVIHGRDLAKCVHFLALCRLARRPCALSRALVPKAHHAVVGSRARGFEALRVRRAAWCADIISQQTSPSTMFK

SEQ ID NO: 68567 - protein, 447 aa, Zea Mays
MAAAEARAAWQRAANRCLVQEDRKRAPKLACCPSSAEQHDVRWWVQSQPNFGIQKDIVSKRLCSLGRDIHEKQVEDSVPQPKHEETLLCQAVDTSTEKIGDALEPPWMVSPAFTKYSLETGLEEMKTVGSYSQVSKCIETLSNCLYKDNEFPDFECIDPAPLKNPDKANFDIDAPWKGEKTRPWWQIADEDQLASLVAERATQHIENCDLPRPTQTVRINRTEPYTQKHIGDFGGPSSPAGRVSHPVPGHCDHIECTYSTGSTDELVLLYGNGVWEQHGSSDTYSVVQHFSSSSTTGLESKQTLRNGSERDMILEALRHSQTRAREADMAAKKAYNEKDDVIKLLLRQASHLFACNQWLKIMQLENIVLQLKNKEHQIAAIIPELPWLTLKEKPTQGQGQRDWTRRKGRRQKKAAGFFDAILFAVGLGLAGAGFLLGWTLGWLLPKF

SEQ ID NO: 68568 - protein, 182 aa, Zea Mays
MCVDVIKMGGKVSCMITHGPWVLIGIPKFVEAWNTKTGMKLRFQGPSSLVCSMAITDEMLFAGTGDGRIMAWRFPAKESNTEPVLILSGHQRPVISLSISARRLYSGSLDKTIKAWDLTTRQCVQTLSEHKAAVTSVLCWDEKLLSCSLDKTVKLWTLSESGNLQVKYTHAEENPRNMIHKC

SEQ ID NO: 68569 - protein, 1484 aa, Zea Mays
MASKSRFVVGSHVWVEDPDEAWMDGLVEQINGDELVVNCTSGKKVTANVSSAYPKDTESPRGGVEDMTRLAYLHEPGVLQNLKSRFMLNEIYTYTGNILIAVNPFQRLPHLYNNDMMGIYKGAEFGELSPHPFAIADRSYRLMINDHISQAILVSGESGAGKTESTKSLMQYLAFMGGKPQAEGRSVQQQILESNPVLEAFGNAKTVRNNNSSRFGKFVEIQFDANGKISGAAIRTYLLERSRVCQISDPERNYHCFYMLCSAPPEDCKKYKLGDPRSFHYLNQSNCIALDGLDDSKEYTETRRAMGIVGMSTDEQDAIFRVVAAILHLGNIEFAEGSEDDSSVPKDEKSQFHLKTAAELFMCDEKGLEESLCKRVMATRGESITKNLDPRAAALSRDALSRIVYSRLFDWIVNKINSSIGQDPDSKILIGVLDIYGFESFLTNSFEQFCINLTNEKLQQHFNQHVFKMEQEEYTKEEIDWSYIQFVDNQEILDLIEKKPGGIIALLDETCMLRNSTHETFAEKLYQKFKDNPHFSKPKFSRSGFTVHHYAGNVTYQTDLFLDKNIDYAVNEHQVLLNASKCSFVSSLFPPCEESTKSTKFTSIGSSFKQQLQSLLETLSATEPHYIRCIKPNNVLKPAIFENSNVLQQLRCGGVLEAIRISCLGYPTRRTFYEFVNRFGILQPKVLGRSHDEVTAAKMLLDKANLAGYQIGKTKVFLRAGQMAELDALRTEVLGLSAKKIQSKLRSFLARKKYIELQQCATQIQAICRGTTARRRYENLRRDVASLKMQTCYRMHYARKNYVEICSASTNIQSGLRGMGARIKLRLKRQTKAAVIIQSRCRCYLVRSRYVRLVKATITAQCGWRRRVARKELRNLKMAAKETGALQAAKSKLEKEVEELTWRLQLEKRIRADLEEAKSQENKKLQLQLQELQLQLKDTKDLLKREHEAAKEASEKAAAVPEILADTAQVNELTAENEKLKSLVASFEEKLQNAEQKFEETEKAREELVKKATDAESKINELKNTMQSLQEKLTSTEAENHVLRQQSMKARPDNMPLLNMHRKSNLANGSLHSDEQTPHGTPMEFGRRSIIERHNESVDALINCVVENVGFSEGKPVAAITIYKCLLHWRIFETDKTNVFDRLIQIFGSAMQKQDNNADLAYWLSNSSSLLIILQKSLKPPGSSVTTPMKRPQTQTSFLGRMGFRASSITVDMDLVRQVEAKYPALLFKQQLTAFVEGLYGMIRDNVKKEISSVISLVIQAPRNAKAGLITDQGSYWQTIVKHLNDLLEILQENCVPTVFARKIFTQIFSFINAQLLNSLLVRRECCSFSNGEYVKQGLDELETWCTVAKPEYAGSAWDELKHICQAVGFLVIFKKFRISYDEIISDLCPVLSVQQIYKICTQYWDDKYNTESVSEEVLDEMKKVVNEGSGQGTSSDNTFLLNEEISLPLSLEEIANSMDAKEFQNVSPPQELLDNAAFQFLRS

SEQ ID NO: 68570 - protein, 157 aa, Zea Mays
MVQMGVLVPTGDMTVVRRTAQFFLNSFQECLTAQRKEREMATAELGFKKQLTKEEKFEKRKQRLAAIGEDLLAIAADQPFRFPATFTFVVRAFSVLDGTGKGLDPRNAKELLRFNDAGVEIVVKERIEGDWRSLLSIEQFTHACFLFFGRDNVCNHE

SEQ ID NO: 68571 - protein, 156 aa, Zea Mays
MARSVPSPRPPSALFHGRRPLQLQLGLQLPCHAPWSSLRAPWPLLGFSRAESHLPIQYHKEAPFYCTCSLLCFSRPRSFPWRPSLLPCTCPPGGRSSPTPVVPPHTPPAPLAMAWMTAVSAPVVLKSSQVGGLCAPSGKLSAPVGNFASLIILLRI

SEQ ID NO: 68572 - protein, 100 aa, Zea Mays
MHASIVDGRRQLFAFVFDEACRVRACMGQRRPRPAADVTRRDVTWRGVDDLSCQLVASGRAGTGHRISGATVSARALSCCSLVLQLHRRPAGGETEVSNA

SEQ ID NO: 68573 - protein, 150 aa, Zea Mays
MLARLPGPPALHWPSPAAKVLGPRPGSGSSIRAPPPAATPGAEADPSQSLQRAPSAARAPSCFLWRNQHSHSKTDDRYFYTEYRCTTPRGLTSPHAPHISRVAPDFKIACCVCSLAGSGKHLSLCPLLQLRTYSCSRSAAVPVLCPYPSI

SEQ ID NO: 68574 - protein, 341 aa, Zea Mays
MVKPPLPRRRTACVTGAGGYIASWLVKLLLSRGYTVHGTVRDLSDNKTAHLKRLENASENLKLFKADVLDYDAMAGAVAGCQGVFHVATPVPSGKITDPEREMLGPAVTGTINALKAASAANARRVVVVSSMVAVEINPKDWPRDKIKDENCWSDKEFCRNEENWYSVAKISSEEAALEYAKQTGLDVVTVNPAVVFGPLLQPTLNTSCQFLVYFLKGGPDRMRDKLWHIVDVRDTADALLLVYETPQASGRHICAPHFISARDLLELLKTMYPDDYPFISKESIYDMEHPAPMTSDKLKKLGWKVRPLKETIAETVEFCQHAGFLEDVEGFRFPPLYNII

SEQ ID NO: 68575 - protein, 570 aa, Zea Mays
MNASRKSSHLSSKDSAETARDIITTSGQIQPLKIPDAVAALAQAAAKANGETEKYLPGWPLFSPPKVQLDKCTKCSREFCSAINFRRHTRVHRRSLKIDRDFPKNRDLLAAFWNKLTVDDASKILSLTGVVIEGVTGSSILTALSSWMCKPGYASLPVAYARAGSELLDLIQAKPSMHLPVSSDELFSLLDEASEKTFLCTNTAACIQKFLFDGEVEKIATELKNVVSCASYMLEQKLLEAWCADKTAEALRCQKLLEDEEEAAQKRQAELMERKRMKKLRQKEQRLKNLKDEDATVQSPEIMDDATCSTAIQSVNSIYDPDCFEQEESQYLQFPALITLETDNDFNVDLPVEDISCDLGPEMDKGVVLRQQVVSRHHLGRTEKLAESSILSGSVVTSKHAALARPSNYKDPNVCSAPSRNKTCELKLRSEIEEQCQKHELDVDERGIGPSKNSRVLIGSIIVAIKDCSEHLLDLGSKNDPVPPNVKTKKHASVKVVQQVTHEGNRNEGVPDSDNRSSLSVTTDEISYSTCCDADLAVDEHLQCTTFSSEEATAFLSQSKHLAAIIFELP

SEQ ID NO: 68576 - protein, 238 aa, Zea Mays
MAPPDSISTCSSLPLAAAPMSEPTPFPFAASPLPNPLVATASFLQHHLSRLASHLNVPRPALAAAAARTPGPQGASLSLSLAPDEVARALTGTPVFTVCNSSNEFVLVSDPATGLRSLGLLCFRSEDADALLSHVRTRQPVLGKGAKVVPITLDQVYMLKAEGIAFRFLPDPLQIKNALEMKSGLTAFDGVPVFQCCAVRSAGCEEAEEALLSSIFSKGRHRKRTYKGFQRFKRVSLI

SEQ ID NO: 68577 - protein, 466 aa, Zea Mays
MASPAKRAKPSSPAKPSSSPPQEEATAAAVSEDPVVLLRRRWELASVLHFLRGIPPVNKHLKDEDGWIIVTAKKLTDWWSWVAEGANPFRNNSGKEVEMYKQQDPIKRLLILKALCEVRSEQDDAVWYVNDEMKKGTHISNFRKDKLGSGSSGTTYWYDGDSTIGHRLYTEDVTVNFKQNWMGKGGRLTKPVTNIYWETVATNLDEFLEISEKLSRKGRAESAIADYLKTEVIPAVENFQKKKERRLKRQEKKDKLLAFTNTFQTRSLRERRPVSYNYSDFDRSIEEAIRAVQKGKVQGSREAGTEEKPASHHGDKGADGRSDINSENNKNGGQEDAKYLSDLSSGDEEDGDYSDRGVSSADSDGDNNASDSYKSDMEEDVSVPRKRTRLAARLANDKPRPGLRRSQRNMKNDEETMHPGQVTPPPMAKKTLRQRPTPVSKQPDITFSSSEDDLAQVVADSEDESG

SEQ ID NO: 68578 - protein, 373 aa, Zea Mays
MSSQSSAGGPAIHHPHSNYHPYIFQHDPPLHSNSRRRRRNHDDPYQPYLPLPHAHSHGATAVVTGTVRCHVPRDPLVLSHLQERLFPTLPQHHPIAGPPPTKRARRAPDTPWDPPPPTLQPALVPVALERPPDVGHSAGALLSRDEIERRSPSRRDGIDSALEARLRASYCAYLHCLGNRLGLPQTTIATAVVFCHRFFFHRSHACHDRFLVATAALFLAAKAEETACLLNTVLRASCEVSQNQEFNLLPYMLCGQDWFEQYRESVIQAEQMILTTLDFELEVAHPYASLSSALGKLGLTHTVLFNVAWNLINEGLRSSLWLQFKPHHIAAGAAFLAAKFLHYDITFHPNFWHEFKTSPYIVQDVVQQLKELL

SEQ ID NO: 68579 - protein, 222 aa, Zea Mays
MAAPTAAVDTAAPPPPPSAEAAAAPVLDQKVSPAAAPQPDAPAPAPAPKKRKLEEAGFHTSEYYKIRAVVADLRVRFVHEATDFRNTDAAREIMREINVVMDLSKKMRLKLGATSEPVKPLEKPSVGLVKDELVKPSEKPSSGPVTGEPVKPPEKPSAGPVKDEPMKPSEKPSAEPVKNEPSEPALAGENNRAPRVSQTTSSPNNAGIDAPVVKHDNSEARK

SEQ ID NO: 68580 - protein, 56 aa, Zea Mays
MCPQLRNPHSSHRHTAPLGGASDFSFFVALLLFRRLRSAAASFLHFRPFTEPPPPL

SEQ ID NO: 68581 - protein, 653 aa, Zea Mays
MAHHRRARLFSAAVVVAAALVALSVGTAQPAAALSPDGKALLSLLPGAAPSPVLPSWDPRAATPCSWQGVTCSPQSRVVSLSLPDTFLNLSSLPPALATLSSLQLLNLSACNVSGAIPPSYASLSALRVLDLSSNALTGDIPDGLGALSGLQFLLLNSNRLTGGIPRSLANLSALQVLCVQDNLLNGTIPASLGALAALQQFRVGGNPALSGPIPASLGALSNLTVFGAAVTALSGPIPEEFGSLVNLQTLALYDTSVSGSIPAALGGCVELRNLYLHMNKLTGPIPPELGRLQKLTSLLLWGNALSGKIPPELSNCSALVVLDLSGNRLTGEVPGALGRLGALEQLHLSDNQLTGRIPPELSNLSSLTALQLDKNGFSGAIPPQLGELKALQVLFLWGNALSGAIPPSLGNCTDLYALDLSKNRFSGGIPDEVFGLQKLSKLLLLGNELSGPLPPSVANCLSLVRLRLGENKLVGQIPREIGKLQNLVFLDLYSNRFTGKLPGELANITVLELLDVHNNSFTGGIPPQFGELMNLEQLDLSMNELTGEIPASFGNFSYLNKLILSGNNLSGPLPKSIRNLQKLTMLDLSNNSFSGPIPPEIGALSSLGISLDLSLNKFVGELPDEMSGLTQLQSLNLASNGLYGSISVLGLP

SEQ ID NO: 68582 - protein, 58 aa, Zea Mays
MAAPLHGFLLPLDLPPRNKDREEEEHIELKGKRGSRRCSSPSLLAEFLGETLGMDEIL

SEQ ID NO: 68583 - protein, 185 aa, Zea Mays
MRDRIRRQRIPRFRRQGVHPIRDDPQATAMAMAYKMATEGMDVKEECQRWFMEMKWKKVHRFVVYRIDERSRAVLVDRVGGPGEGYEELVAALPGDDCRYAVFDFDFVSVDNCQKSKIFFIAWYVRHRRRRGYGPRSCTRRRSRACGGCWTGCTTRCRPPTPPRWASTSSEAARNESVIGVGVMS

SEQ ID NO: 68584 - protein, 516 aa, Zea Mays
METLPNGSVNNAELNQENEKSMYASESEEARDIFVYREDVVSLKSKEDVRGVVLEVAGEYDYDGSITDDDIDTEEHEDKTAYGAENGVADGGLQCSLGPGEPGASTFVLVAYDYIESGGAFGDPYKLYGVSQSQKLLPNKTEDDSMSIQLETKGDQQSVPLEEQNPEDLTLLSRFSYTNWQLTDWCLSQRYTSCTNDTMIDSDKHTWQICTCSENSVPLSGIPESQADAQIDTDTGHRQTDVDSTADVLSMSDGDNSCIAKESETGTSASSISNEGPQDNATSRKKFRKVFFKKDKRTKKRDDNFERALLIANTCTKVDVIWQDGTKECGVAATALIPIHSPNEHEFFPEQYVVDKVTNDVGVDDSSEPRRVGLVRGVNAKDRTATVSWFKPPLHPEEPKEIACNEIVSVYELDVHPDYDYCYGDIVVRLPPVKPVIESTNSKEQMELDKTLDSSEGFAASYSAPPDTSADEQLSQKESCLQFTSLSWAGNIVGFQDGEIEVIWGDGSISKMMVPH

SEQ ID NO: 68585 - protein, 369 aa, Zea Mays
MGEITNVMEYQAIAKQKLPKMAYDYYASGAEDEWTLQENREAFSRILFRPRILIDVSKIDMTTTVLGFKISMPIMVAPTAMQKMAHPDGENATARAAAAAGTIMTLSSWATSSVEEVASTGPGIRFFQLYVYKDRKVVEQLVRRAERAGFKAIALTVDTPRLGRREADIKNRFVLPPHLTLKNFEGLDLGKMDQAADSGLASYVAGQVDRTLSWKDVKWLQTITTLPILVKGVLTAEDSKLAVANGAAGIIVSNHGARQLDYVPATISALEEVVKAARGQLPVFVDGGVRRGTDVFKALALGAAGVFVGRPVVFSLAAAGEAGVSNVLRMLRDEFELTMALSGCTSLAEITRKHIITESDKLSAIPSRL

SEQ ID NO: 68586 - protein, 1089 aa, Zea Mays
MMIATAALLASSDSVEALLAGKGGVPAPADELWQLKQKLDEARGLAADAEAKEGRDAGARAWLRDLRYALYVLGDSVDDFRRAAARRHQQGRRSLRHWFTLPSNIDRNQYKTFKTSISSLNKQMDDILQKGSELGLQAINQEAQSGSSEFSWGVMPDDGTLGDIHNEKNKLIDVLTERKSPNKVVIIVGDSGIGKTTLARKIHDDHRTRNAFTIVLWVSVFSDLDDIGLLSAIVKAAGGNPSGEENRVQLEAMLAAILKGKRFFMVLDNVRSDQIYENSLEAHLHVCGHGSRILITTRDGSISTQMTDAYIYRVKKLTFEDCWSLLCRASCLNESLHGDILRNIGIAIIQKCNKLPMAVKIIGAVLRTKEPTCKAWQKVYESEGWSFSFGELRDYVHGLTGAMYLGYHDLPLHLKQCFIYLSLFPEGFVIRQQFASQLWISEGLIDARDYCSLEKTAERYYRELLSRSLLQPEIGNDDMTRCTVHDQIRSFLQFFVDDKIFTGDLKTPREGLRHVWIRSNLLRTTVGKILGVKSLKTVILYKNPSGNRSLDELFKELRYLQVLDLSGTEIKYIPRTLDFLCHLRLLNLSLTRITELPESIEYLTNLQFLGLRYCNWLHNLPNGIGKLQYLRYLDLRGTKLHQVLPSLVNLKQLSTLHGFVVNRRPKREDDPTGWPLEDLKSLEALRSLQILKLERVSDPLRVQEAMLETKSHLKELELCWSNDDRQSEVQEENAGTLKNVSDSLSPPHCLESLKIVSYYGKVFPDWLPNLSNLQRLVLTDCKFCEHLPNLGQLTELKFLTITACSKLVTIKQEQTGQAFPRLEQLHLRDMPNLESWIGFSPGDMPSLVKFRLENCPKLCNLPSGIKHSKFLTSMQLHHIDSLRIIEDLPALKELVIQACNELQKISNIPLLEVLIVLGCSRLKDVTEVHLSHARIVDRDIRELPDWVATNAYMLQTFTIVGRAELLQRLLPNHEDWEIIRHISKVYANLPDESPFFTYTKSSADFHVDQIIGERGNPSVLLPADVPHQSLNISLANSVVRTFRVGVPRVPLRRISTMKRANRTNREIRLVQTLFIFFTTVILLLLVFLE

SEQ ID NO: 68587 - protein, 519 aa, Zea Mays
MALAAAPASGDSQSGPQRNYQVVVAATRDMGIGKGGVMPWKLLGDLKFFKELTLTTTDPAKKNAVIMGRKTWESIPVKSRPLPGRLNVILTRSGSFDFATVENVVICGSMKSALELLASTPYCLSIEKVFVIGGGQVLREYLNGPACEAIHLTDIQSSIECDTFIPPVDFSVFQPWYSSFPVVESNIRHSFVTFVRVRKSVAETHESNGKESTEIDTKNDKFEIENFSFLPKIVYDRHEEYQYLNLVEDIIRFGAQKNDRTGTGTLSKFGCQMRFNLRKNFPLLTTKRVFWRGVVEELLWFISGSTNAKVLQEKGIHIWDGNASREYLDRIGLAHREEGDLGPVYGFQWRHFGAEYTDMHADYTGKGFDQLMDVIDKIKNNPDDRRIILSAWNPSDLKKMALPPCHMFAQFYVENGELSCQMYQRSADMGLGVPFNIASYSLLTYMIAQVCGDFVHVIGDAHVYRNHVRALEEQIQKMPKPFPILKINPSKKDIDSFMASDFKLVGYDPHQKLEMKMAV

SEQ ID NO: 68588 - protein, 335 aa, Zea Mays
MAGSGNLQTFRLLRYLRGRISAEGQVNYGLQMALKSIRVCGPRYWPQVIKLAPEDKPWWRSGDKTNPFNGGVLYIKRKVGSCSYSDDPIGCQSLISRAMHEVCDAPSASCSNQPNSTNGSYFRVDQLVSTFSANPSLIAFAKLCSVSWKSRCNSNFQEFCSQVLYECMSKDRPSLLQAYISFYTTIELMWEHLKTGNFPFYNSLFLPNLKVALAYNEALVDSRITNGGIIHSTFLESLMKRVGDIFAELPNLKDNLHRYLSTGTWPDTQNDVVVLSWYLQWYNIPPAHVVASAVEKVRPRVPAGVSMLPLLRLLLPTTHLVGLMEIEKVQIVMEC

SEQ ID NO: 68589 - protein, 281 aa, Zea Mays
MAAGSIVVDFPSMGAALCFPNLESLLRDSASGFLSAVSAAPAPGAADLTNFHRVFSRVLSTYSDPPLEVVWFFSALSFHDRPDDLRSLLQLLSAFAASSPGAAKPLALLAPVVSELFHSDKPRRETEAVVEAVLSYISICSSRPAPSSTEGTTADAVRLLPAFGDLVKVWSVRHSRERCPFQVLFPLAGDEARRELMKEGCSVDYLAGVVLVEAFLLRLCLKVQNATGVPRSELQKELKIWAVSSIPVFQSHQFFGVLLNMLLNSPLPVYSLVESFLICGN

SEQ ID NO: 68590 - protein, 371 aa, Zea Mays
MGIMRVADDVEARLVVGAGGGGGTATTTTEPLLRHCHGGRKEEDDQGSKIRDSPEAEGASDCGRTDGGSLRMVLVSTAVAVCGSFEFGTCVGYSAPTQSGIVEEVGLSISEFAIFGSVLTVGAMVGAVTSGRLADFLGRKMTMRISATICIFGWLSIHLAKSAIMLYFGRTLLGFSTGVLSYVVPVFIAEIAPKNLRGGLATSNQLLICSGSSATYIIGALVAWRNLVLVGLVPCVLLLAGLFFIPESPRWLANVGREKEFHASLQKLRGEDADEYIESLYSLPKARLRDLFLSKNIYAVIVGVGLMVFQQLGGINGVGFYASYIFSSAGFSGKLGTILIGIIQIPITLFGAILMDRSGRRVLLMVLTLQS

SEQ ID NO: 68591 - protein, 207 aa, Zea Mays
MASSSAAASAAALEAVQVLVASLADDSPVARDAALAALRDIAPLNPMLILDCCATVSRGGRRRFGNMAGVFLVMASAVRALDHSDAESEFLRKIAKIATAEIVTSKEFNVDWQRAAACLLVAIGSHDPDLMMGEIFLHFSGPTSALPAMLQILADFASSEVHPTVEGRAFACFTYPRKCARWPTACFCECIQVLVPGCMAVPGRCPL

SEQ ID NO: 68592 - protein, 798 aa, Zea Mays
MASHGAGVAAGSDAPHAEVVSMGQTNLSPYPLSSSHHSWSSATGSATVSWNNTVDKLSQDTVYYDPQRDVSDSGGNQNVESSVPHVAQSSRGMADVAHSHMSYSSSDQHVYNPVEYANYYYSYPQATNDSSVQQGANQHPGAAYQPLTSFQNSGSYIDPTSNTYYNAGGHQTVPGYGSSSYYYQNNTWNGGSTGNTFAQSYQNYSSSDTNAQQSSTSVPANSLPYQQQYNQWPYYYNQSVPSASSNPVAGNSTTDNLTGNMPSGYSYPSSQPPPPGTTSWKSNSVASVAPPMQVPGVPGQQSQYGNQAEGHYNQGPGVQWSQNHYAYQTQPYPQKTNSNHPQLSNHEDQQETVYSNSPSTNLSSNHVSENFKPNLQDSVTMDTSSEGKIQVPINPQIAPGFSMVIPKNEKKHSGLDLSKKPAYVSVSMPTNDAKATQVGLDARLPFSLRNYATRNLNRCKNDAQREACRSIMNEITKKAFAEGTLLTKNWDTEPLFPLPESTVGMTGTSSVNNLSPFSSVSTPRKRVKSRWEPVVDENVTNKVEQIAKGLIGSNVHSTSDPKNRMGSSWDHRKFLQSSQAPSNKVNQRSAKKQKMGSNLSQIQNGNASSDSEKEHDLTKYYASATALANSPEEKKRREHRSKRFEKSKDSSFKSRNVSANKDAMTNLRARRAILSFRTRTYEGGTLAVEDMDWDALTVKGTCQEIEKRYLRLTEAPDPAKIRPEDVLEKALAMVETSQKNYLYKCDQLKSIRQDLTVQRIQNELTIKVYETHARLAMQAGDLHEFNQLIKRSQTRCSC

SEQ ID NO: 68593 - protein, 155 aa, Zea Mays
MKTLCLVFILFCRLWPMNVSFGVLRVPLLFRSSSLANSLKKGRTQCRRLPALCGVGLGKGTLSVKPYPHNMQRLGLEPGTFRLQTLQILLYRCLELLALPKLTRGRKTMRQQMMIALKKQRTAQVMTVILLTDYDFENDDGLFVDNVDEHGIDER

SEQ ID NO: 68594 - protein, 69 aa, Zea Mays
MDITTPDLYESRRRGRYLHDSVVARPRLSRNDGVDVATHSTSSVCGVDELRRDPPWHRFDLQSRRPGPW

SEQ ID NO: 68595 - protein, 315 aa, Zea Mays
MAGRRGDSAAAPLLENKAAPASASEAEAGGGYHHHNNNYYYYVDGCPGCAVDRRKAASPGIPYANFIYVWIVTLCTALPISSLFPFLYFMIRDLNVAERTEDIGFYAGFVGASFMFGRCLTSTAWGIAADRIGRKPVVVFGISSVVVFNTLFGLSVNYWMAIATRFLLGALNGLLGPIKAYAIEVCRPEHEALALSLVSTAWGIGLIIGPALGGYLALPAENFPAIFSPDSVFGRFPYFLPCLCTSVFAAAVLVSCIWMPETLHRHKVHESTSQDVEKVQESGIRKKKSLFRNWPLMSSIIVYCIFSFHDMAYTE

SEQ ID NO: 68596 - protein, 679 aa, Zea Mays
MHGLASFPEAHSRIHKGLRYSVTAGDEVEDMFALLSEVKRRIPSISAVSSGAIASDYQRLRVESVCSRLGLVSLAYLWKQDQTLLLEEMIRRGIVAIIVKVAALGLKPSSHLGKELAELKCHLLQMNENYGINVCGEGGEYETLTLDCPLFRNARIILDDSEVILHSADSIASVGILHPRAFHLEQKPDSSDRIGDGSAVQESSSCVYEVDEVTTHDDVGEKQALSPAVDAYTNVDLCISKTGNNLRSMSCWIQDPSRASEGLKADLIAVLSRIENQLKEEGLGWVNVLYVHLYISSMKEFGLANEVYVSFITEKKCYLGVPSRSTIELPLVQAGLGKAYVEVLVSNEVVKRVLHVQSISCWAPSCIGPYSQATLYEDILYMAGQLGLDPPTMKLCLGGPRAELELALQNSEAVANAFSCSIYISAIHFLVYCSAQLTSSEKEEIEQTLKSSYITRLDRSKGGSYPTVLYVFASDLPKGARVEVKPILYVPSTDDWVAAEETETGVPLPAPSKTWTDCTAPYSALRDSCCQVHTTGGRICSAVVSITDDIASKICSAAGQLHHGEENLKIMARFCAFQIAKTLADNRFSWDSVTMLRLYYSVDLAVAADAVSGAFSEALAELAQDNPSMRTDVPFYNVVPVAGAGRSACANDIMACELLASNVSSAKSIPAEPFAVTPA

SEQ ID NO: 68597 - protein, 247 aa, Zea Mays
MPQRSEAGTAGEGDEEQRLRAALRHLQAEAGVLERLVYKHRNQHRGAAYFQYLLKVRRDLKLLLGAGLAEVLNAVFPVLACRKPANTILVPNKQSKKKPVANHSHHQRLLGVARLLSQMSEPVMKAAIQITFLLARSFFVDLCTAVLSLLARMLLDVVSIYNKVTDLTERKQAVKISISGVQAFREYYPSMNDACTVLECVWIKDKFVLHEKVKDISQETQVENQKCCGPESTVQYETIALISEDST

SEQ ID NO: 68598 - protein, 297 aa, Zea Mays
MDLYVFATPYRITWDYYFAAREHTLEIKSWEEEAELKYVKEHGISIFLMPSGMLGTLLSLIDVLPLFSNTAWGQHSNLAFLEKHMGASFEKRTQPWVANIRKEDIQSGDFLALSKIRGRWGGFETLEKWVTGAFAGHTSVCLKDEKGDLWVAESGYENEKDFDLQGIIMEIERRGMSFDQLLTIPEQDEWVYSDGKSTTCVAFILAMYKEAGIFTPFSESIQVTEFTIRDAYMLKIFEDNPARLPGWCNAGTDKLPFCQILGEYRMELPEYNTIEPYAKMNENCPSLPPTYKRPARC

SEQ ID NO: 68599 - protein, 188 aa, Zea Mays
MATTTAAARWSFPARLQLLTSRRFCFPASSAAPPSSVAGFSWADALRVAGDGGRGDESDLSGYFRKVKSCNRGMDKKGQFVKFSVEDQVVGYIHKGFIEHIRDFHDVFTIVMDDNGSNTVEHVSLQSSLRTPEDRTHAIGSVIKSLGELIPALPSNVILWHACVLLSGTCCCSLLWYKSLWSSYEWVC

SEQ ID NO: 68600 - protein, 1786 aa, Zea Mays
MDLVTGPLAILPSKLQELLQIQDEYRLQKEVRGRVEMICRELQSMHAALRKVADVPRDQIDLQTKVWRRDVREASYDIEDAIDTFLMRIRDRAPSDPNRFRLAMKKMTKLSRKVKAIHEIGAAIGDIVRKIQELVDRRVRYKLDVAADRSISMVSVDPRLAALYKEATQLIGIDQSMSEIISMLLSDESGQQHIKKISIVGAGGLGKTTLAKETYERLRSEYEFATFVSVGQNPDLVRVFKNILVKLDIYQQVDTINRTDTRALIDEIRQRLSYVRYLIVIDDVWDLESWHTLELAFVENNNGSGIIITTRNFAVATIAGRVYKLRPLSYHHSKELFYRSLFGEGVCLDDQIINKASDKFLKKCDGIPLALITMASLFMGKPTQMWSELANNAFGHKGRNSHLEETTMRILSLSYSDLPLNLRTCFVYLSRYPDDYVINKSSLIWKWIAEGFIQEEQGKQLFELGEEFFNELVSRSIIQVVQSKFDNTVQGFRIHSMVLGLIRLLSSEENFVSVLDEEGQISISGKLRRLAIHNRKEEHNLGDNMDLLPWLRSFTAIECPIYMIPPVFIFKLLRVLDLESCGSMEGYDLKQLGNLHNLRFIGLCNTYVRTLPQELGHLKFLQTLELKGSGVEELPSSMGELAGLMCLNADWTTRVPKWIGMLTSLQQLVMYPCGGYSARWFVKGLGHLRELRMLRLLIKADDEKQLAQLLESVLKLPKIEALHLDYYGGVQLNRLVKLEPSDFACSGRLRSLELQLLEFSRLPVWLNAYYLPQIRDLSLLMFDVDKQDLKNLGDFKELRHLHLLIVNTERRDAITCASGGFRNLRFFSITKPFKFQQGDLPRLEILDFHFNVPLQSGANSGLDFDFGLENIPSLQQVIVQINCLDAFPLPEEVETALRHAIGVHPNRPIVDISLPRRKLDKADNDGAEGRSKLAHYSKSLSSAHDKPMDELIKRLYVVDNEAYDKKMKIVPIVRSEGLGKTTLAQKVFDKLSPHFDCAAFVLVGQNPDMRKVFTDILIGLDNQKYQDFPMTILDIIELIGLVRKSLINKRFFVVVDDVWDLKAWDIIKSALIENTNGSAVLTTTSRQIWEHENWRPSGDDKSDSDAEQLEPHLDVTTPADVLPASSPSKSKVVAHVELRHDDPDSSAFGIPQVAGDTQPELRLFPEADADLKGFFYENLFGSEDKCPDDLKDICKDLIQISAGVLSDAYETVEELRGYEISAERLVWAWIAQGFVKETQGQNDLEKVGKKYLIDLISRKMIEAVEVHADGMALSCRAYDLLHGLIVSLSTEEKFVEILNDSQSQERASNPNTEVHRLSIQIQRNNMLHPLPKAWMKQVQSLVVSSDTVPDLSDFQGLHAMDLGGCDSLQVDHLKGISKTTSLIYLAIGGKYIADVPKEVSWLKKLRTLDLTASGLSELPRCILTLTNLERLFVNSHMKIPGKISKMSGLQELGDINIVKPELLKRLRKLSKLRVLRIAMWSWDEGSKSSVKLWWETLHSLIGSCKKIESLCILTFCSLDFMDGSGDDNKWPPQTLKNLEISHSAFLDKLPSWFDSLSTISSLTIEVNKLSKNITDTLAKLSALRSLSLTSIEKPEPEVRFVIGSAGRFENLESLKFVCNEMVNLLERPESNATQQLTGLTIVFHASRTERSRNKDFRFGLDKLLSLQHVRVEINCSNATQRTVKNAEAAIGEEISKIRRDDGSQPILEIRRLQEESMIAGKDQTQDANKTPSSSSTMETTLRAQPIGESLMPSVETVSSKVFVSQNSSNDTFFNNVGILTSSTKIK

SEQ ID NO: 68601 - protein, 1164 aa, Zea Mays
MEPPSPPATHSAAVRVLSRTPPPTSPNPSSTGPAAPSPASRDGVVAVGFVGAAGTARLADRILDAHVFSPGGSAGSLAGRVRYHRDAGKRMVFLHLTPPPPAPLEAVAGCCDDGELPEMLFMFSVCHVIIFLQQGFRFNTQTLKKFRLLQSSKHALAPFVKPLVAAAMPARTVASDTPTRATHRASSVSPPTRRGGHAGRQSSAISLMSGTSSTPSVLPGQCIPVLLFVFEDDAVDVSSAAASPDDIGDASSSNQGSTPDGLPKQSLASKSSGSVIMLSRAANKSEGSSGKKLHSSLEGQIRVLIKKCRVLAGMEPGHIGPRGVSNMSHHLPLFSLDTSRVVALLERYINKKQEPLDTIAGLFEDSLCSKSPLDILSLENNYHPTNHDDFQLIKDFIFRQSDALRGKGGYSSNASAGSVAGVGMVAAAAAAAAASAASGKPVNAPDLPTFDKWLSISTSILTALLSGRNVLRCQSESKTHTSPTEKNGQLPVGSNAIEIALSCLESNNGLNMKFSSSWCQRVLPAAKEIYLKGLPAFYPTRMHEVQLQKALRSFGSMVKGPAVRVFSKKLEDECRAIWESGRQQCDAVSLTGRPCKHRRHGDFFSSDAMEQHSSGYVFLHACSCGRSRRLRDDPFDFQTANVSFNCFQNCDDLLPTLALPRGSNDGSFSVSSWCLVRLGGARYYKPTKGLLQSGFSSKERYLLRWIVSVHKGQVRNDIRSNTITSSARSGMNPQTPPIVTGEVKSAITQVTAQIKYAKLENSGKQAEVEPVSNLGINFGKGLPNFTMKKPFSEVVAGTTSKDTEFPALQQTRPPKPGGRKDEQRQMNIVDQTNGRGHVAVSQGSVAETESAKASRNKSSENADGKPFLQIGSNIVPVIAGNETRETSQPVQQFVVYIGFEHECPYGHRFLLSEKHMKEIESSCLQYQRPHLNKEAEVKHAQKLLQNASGLIASAVDINSARKNSKPLESSGRNSQQQSLQLRIDAETSQPSPRLSDPQNAKRWEHYFRSVTIDDGGEAFSLMNRNLPIYMRCPHCKVSERKEHQDVKFAGVVSQLQRIFIVTPDFPVLLASCPLVQFEGSCLPSNVSDHDREGSFSIGCRVILPPESFLTMRLPFVYGVETKEGSKFPLKYFERQPELTAWLVAGTALQIVSVGDVTEKETVMK

SEQ ID NO: 68602 - protein, 661 aa, Zea Mays
MAAALAPGVSRKLKKVLETRTDNPDLLASLGALSTFYVQNTPQARRNLKSSIEQRALAINRHFLDASLPAHKALDRVEGEVHALNDSWKKIEEALNSCSASTGDIISTTERLQQELEVITQRQEIVSCFLRDYQLSNEEINALREEEIDDKFFKALLHVQEIHSNCKVLLRTHHQRAGLELMDMMSVYQEGAYERLCRWVQAECKKLGDTDNPEVANMRHHALFRRFISALTRGGPGGFPRPIEVHAHDPLRYVGEMLGWLHQALASERELIVVLLDPDAMTDSGPTFRRQSGRDGDSSKGEPDVTSVLDRIFEGACRPFKVRVEQVLQSQPSLIVSFKLSNTLEFYCYTISELLGEDTALCNTIWSLRDAAQQTFFNILKSRGEKLLRYPPLVAVDLSPPPAVREGISLLLELIDTYNSMMVPASGKRPNFDPVISALLDPIIQVCEQAAEAQKSKGSLARRGRTSSDPSGNSRDSISVDAILSKNLSTSILSAESSSKVYLINCLSAIQEPLMGQEVATSYVNNLRSMIEAHICVLVDKEVDCILRKCGLSNKMPYIKEYGSKADARPLADIIETSPQMLMECLKAFYGIVTGTEGSLPEFEQLQVPRLRSDACNGLARALAESYELIYSAVMDPNNSYPDPRSLVKHSPEQIRTILEA

SEQ ID NO: 68603 - protein, 824 aa, Zea Mays
MADSRGTTPKSGDNDNTSTRPARLRVMRPEVKEFLTSPRRRRPKKQPPPPPPPPPRNVKLKERKNKEKGKAATEEDKFERAQYNCPFQDEGEGGRDFAPPELVWGKHRKAGALLIVYFWDRTFAWSSPSALLPFRSNFTRLSAQSTMSSFVSAMDSALQEVGRRVEAGLSCGCFTSSIATKQEVQNSGIRQGAYGAAVDSVYTRDAFHSKTFLDYISALGKKPLAGADLLVLATVKAQLRALNRSRGSRDLPEFEMFEGTDEITEMTHTDGDDTLSRGKKSKRMKSSSKKKTDISKHLDGLKTGSVADSRTLAKKAVGDALSERKSGRTLRSTSKKEDALEGLKRLAKDGIQELTGKSKDAPILKEKNQGHGAGSAHKKGRITEDGYHRLGDSNAKDPIFPGKRRLGHNENSISKRVPISEHGRKKKKLSELMAETGKPNSASSGKSKTRGKRSLHDSAEKTEDPEHHSKDTLMTRKRKKLNTLGDLSSLSEPLSRKKSTKVGELMSKVAGSSMLQAAPAVKANSAVSQTKPRRAKYRQVNAADKSPCPVKVNQGNSEAVSKESLSCGEMLWQLSVAACGLQQREKIVPTSVNFFTGFRKNKFSSSDVNEGMPEKAANTESTLSEQPIADHMQDDYWADILINVEEPLSNLKKKIDESKKRVNKKAPQVKKPPVNSLSTVENVDEPRSEGNQDTGNEEQLRNETKLFSANGSQLNAGTKFGQEMENCFLSGLVLHFSRPCAVPSQCDLIKIFSQYGPVNEVKADVANSASSAQVIFKRRMDAEAAFAGAGKISALGPALVSFRLTDFPASASGNKASHVASKSE

SEQ ID NO: 68604 - protein, 328 aa, Zea Mays
MRRFLPAGGGGGGGEPSSSSSSGGHQHHQHGGLASGERAAAGLRYRGGADISLGHGHDDGGHGRSIDAADRRNDGSMDMLARHSSSPVGFFSNLVVDNGYPRSNKAGGGGGVEGQQHDPSTAANASGSSARKMKTPEFNFTGAQQGQQLGAAAGHLSRISEDGAFPGGMMGDRAGRGSAGESSGAAAAARSYSAGGFSIVGPWEESRDIITTLGAYDPQFSGAMAGTALEMAGMDRYVQLQQDQVPFKVRAKRGCATHPRSIAERERRTRISEKLRKLQDLVPNMDKQTSTADMLDLAVEHIRGLQSELQVIIIYVRTYVRACACICM

SEQ ID NO: 68605 - protein, 263 aa, Zea Mays
MDGTLQPAVGADGRQVEAQGNVLLASIENMQYAVTVDVLHTVFSSFGSVQKIAIFEKNGGTQALIQYPDVSTAAVAKESLEGHCIYDGGYCKLHLSYSRHTDLNVKAHGDKSRDYTIPAGVIQGVPPGVQATSSGWQGNVQAAGAYAAPPGAPSQSHGANGHVQNWNPGNSVYPPAPGPGIYPGQMYSSPSQYAASGGFPNTPSTAPPHYAASGGFPNTPLPALPGAPTQQLHASQQMLPQHGNQSGGASGTSQPAPPASYYR

SEQ ID NO: 68606 - protein, 776 aa, Zea Mays
MPSSRRTTGRGGAGAGAGGAGAGDAGGGDGDRVPRFMGNNRDHNPRELRSWARRTGFHPSAFFSGESNSSFASSAAPQPPPPPPPASSRRPPRPPPERDPDPDAEDDLDPAPGRGRGRRPRRRIDLRGELQIPPGFGREEAVPGSAEPDARRGGARGDATRRNGGVERGQAPANAGRNGNGALADADARKKAEDAEAKRKAEEAEARRKKEDEERDAELAAYYQEQWANEDEGAAGAAAAAAETAPLYEASGLRCGVTENPGWAPLIFYGIQHYLSIAGSLVFVPLILVPTMGGSDEDTATVISTMLLISGLTTILHTFLGSRLPLIQGSSFVYLAPALKFKHIMRELQGAILVGSVFQIILGYTGLMSLFLRLINPVVVAPTIAAVGLAFFSYGFPQAGSCVEISMPLILLVLLCTLYLRKISLFGNHIFLVYAVPLSVAIVWAYSFFLTAGGAYNFKGCSSNIPSSNILLDSCRRHLETMRRCRTDVSSAWRTAAWVRIPYPFQWGPPTFHSKTGIIMIIVSLVASVDSLSSYHAASLLVNLSPPTRGVVSRAIGLEGISSFIAGVWGTGTGSITLTENIHTLETTKMASRRALQLGAAVLVVCSFFGKIGALLASIPLALAASVLCFTWALIVALGLSTLRYTQAASSRNLIIVGFTLFISLSIPAYFQQYEPSSNLILPSYLLPYAAASSGPVRTASSGLNYAVNALLSINVVVALLVALILDNTVPGSRQERGVYVWTDPKSLEVDPATLEPYRLPEKISCWFRWAKCVGM

SEQ ID NO: 68607 - protein, 991 aa, Zea Mays
MQLTKNEIEETQMIVTTPEKWDVITRKSSDMSLSMLVKLIIIDEVHLLNDDRGSVIEALVARTLRQVESMQSMIRIVGLSATLPTYLEVAHFLRVNPDTGLFFFDSSYRPVPLAQQYIGISERDYTKRSELFNTLCYEKVVESIKQGHQALVFVHTRKDTGKTARTLIDLAAKAGELELFSSADHPQFPLIKKDVSKAKSREVVEFFESGFGIHNAGMMRSDRSLMERLFGDGLLKVLVCTATLAWGVNLPAHTVVIKGTQLYDPKAGGWRDLGMLDVMQIFGRAGRPQFDKSGEGIIITTHDKLAYYLRLLTSQLPIESQFLGSLKDNLNAEVALGTVTNVREACTWLGYTYLFIRMKTNPLVYGITWEEVMGDPSMGAKQRTFIIDAARALDKAKMMRFDEKSGNFYCTELGRIASHFYLQYSSVETYNEMLRRHMSESELITMVAHSSEFENIVVREEEQDELEALARKACPLEIKGGPTDKHGKISILIQVYISRAPIDSSSLHSDAQYISQSLARIMRALFEICLRRGWSEMSSLLLQYCKAVDRKIWPHLHPLRQFDKDLSPQVLWKLEERNVDLDHLYEMEENEIGALIRFSHQGKLVKQYVGYFPYVNLSATVSPITRTVLKVDLHITPEFVWKDRYHGMSERWWIIVEDSENDTIYHSELFTLTKKMARGTPTKISFNVPIFEPHPPQYYIHAISDSWLHAETLFTVSFHNLTLPQTQITHTELLDLKPLPLSALGNKTYEDLYRFSHFNPIQTQAFHVLYHTDNNVLLGAPTGSGKTISAELAMLHLFSTQPDMKVVYIAPLKAIVRERMNDWRKRLVIQLGKKMVEMTGDFTPDLMALLSADIIISTPEKWDGISRNWHSRSYVMKVGLMILDEIHLLGADRGPILEVIVSRMRYISSQTERSIRFVGLSTALANARDLADWLGVTDDGLFNFKPSVRPVPLEVHIQGYPGKFYCPRMNSMNKPAYAAICTHSPNKPVLI

SEQ ID NO: 68608 - protein, 193 aa, Zea Mays
MTTILGLRKTANTRRASTAVCCAAQSSEPRGDVGAAAQNIEHVAHDILLQTMATGRLLRAVLGRQSQQGKARGHGEMELRILSSTYGASIWWGCGEKEIGALLLAAQGTRGEQSCWPPVRQPWRGFLQPWSRRGRWEGMSCCWNSWAPWTGSWATMEVEKGAARLGKQGRWSWEGAAKERARRGALRRLGRHG

SEQ ID NO: 68609 - protein, 218 aa, Zea Mays
MNRKEPLCARQTPTQLTSAMASAAAVEWEAAARKVLVARKPCFGLPTACPTCLPVLLYLRMAQVPFDIHVDTSFPDADHIPYVEFGDCVAFNNEKGGVIEYLKDEKIADLNSNHPNISSTTVLDTKAMVSSWLANALLYELWVVSAGSIANDIYFSDLPWPIGKILHWNKTRHVKQLLGITKLNAAEKEEEIYLKASAAYDSLSFRLGDQVFLFDNRC

SEQ ID NO: 68610 - protein, 772 aa, Zea Mays
MWQRDAPQEASTKLHGRYRLENKSPFPTAKAGRAEEEENKTKPEAFSPILRWIYRRIFRVREGSSPPPPEIRSPDERAAAEDPAEAEAGEVVFDDAFDIPHKNAPHDRLRRWRQAALVLNASRRFRYTLDLKKEEEKEIIRRKIRSHAQVIRAAFLFKEAGQKDIREAYTGINLATASRSFPIELEKLNTLNRDHDSVLLQEIGGVKGLSDLLKSNLEKGVSPNEDELLQRKNVYGSNTYPRKKRKNILRFVFEACQDLTLVILMIAAAISLTLGMTTEGVDEGWYDGGSIFLAVFLVILVTATSDYRQSLQFRHLNEEKQNIQVEVVRGGKRFGASIFDLVVGDVVPLKIGDQVPADGVLISGHSLAIDESSMTGESKVVHKDQKAPFLMSGCKVADGYGSMLVTGVGTNTEWGQLMANLSEDNGEETPLQVRLNGVATFIGLVGLSVAGAVLVVLWIRYFTGHTENPDGTPQFVAGTTGVKQGFMGAIRILTIAVTIVVVAVPEGLPLAVTLTLAYSMKKMMRDKALVRRLSSCETMGSATTICSDKTGTLTLNKMTVVEAYFAGTKLDPCDDVSQMSDSAASLIIEGIAQNTTGTVFLPEDGGAAELTGSPTEKAILSWGLKIGMDFDDVRTKSSVIHVFPFNSEKKRGAVAVQLDDGVHIHWKGAAEIVLSSCKSWLSVDGSVQSMSAEKHDEFKRSIEDMGANSLRCVAFAYCSFDIEKIPMEDITSWELPEDDLTLLGIIGIKDPCRPGVRDAVRLCTTAGVKSQL

SEQ ID NO: 68611 - protein, 126 aa, Zea Mays
MHKYDIWRVGVVMLELMMGSPHVFQISDRTRILMDQHLGGWSEQTKELAYKLRSYMELCILVPGISSQHHGSGSPEQGQFGLASWKCSEESFARQVKIRDPLKIGFPNLWALRLARQLLVWHPEPM

SEQ ID NO: 68612 - protein, 820 aa, Zea Mays
MADLLLQAREQLIEGDAMDGLAQSVNTAGLFSTGSGRPLAVSQRAVRRASALVGEEVDEATDNNNKKRSGVHKDNFFPMFQSGSGKAVLLNKDSIQKARAVLEENVENAAGAKQPMFHTSTGRSVLVSKSSIDKARAVLGGRMIAHEGDVSNLSYGTRAIGYAVPDTPVTKTSANQFHMGREYRPVNEIPKVPKPPSRCLSEGDNASNSKDKTQWHHMPAGSGNTDCLANGKRIIGGRNSVSPFKRPRSSRWVSNHYKWIVWKLASLERCYPTRVAGKFLTVDNVLEELKYRYDREVNHGHRSAIKKILEGNSSPSLMMVLCISAIYSCPYQNNNKLEVNKVDTNEDNSGNQSFSATNRNMSANIELTDGWYSLDASLDVALLEQLEKRKLFVGQKLRVSGVVKLVVHINGTYRARWNDALGFCKHVGLPLAFRCIKVSGGRVPRTLVGITRIYPILYRERLPDGRFVVRSERMERKALELYHQRVSKITEDILFEQQENCDSTDDNEEGATICKMLEHAAEPEFILAGMTPEQLKCFSSYIEKQKIVKQNEVSEKVEKALVVAGLSSRDVTPFLKVRVIGLVNKHSASTSSNKEGLITIWNPTEMQKDNLVEGQAYSVMGLVPSNYCTEIMYLHARGSSTTWKPLASAQTTDFKPFFTPRRAIELLKFGEVPISSEFDIAGLILYVGNTYLCNNKKKQWLFLTDGSKFVSGQGCEEQDCLLAVSFSSATTDEDSTLFSYTLSGNTVGFSNLVKRQKDETRQVWVAEATESSSYTLSNEIPRKSHLKEAAVLAERWASRSYHKIQELKERVLCIVGNAGV

SEQ ID NO: 68613 - protein, 825 aa, Zea Mays
MVAAAAAAGGGADAGCGGGGGGGGKDALFVELWKACAGPLSSVPLLGEKVYYFPQGHIEQVEASTNHLAEHQGTPLYNLPWKIPCKLMNMELKAEPDTDEVYAQLTLLPDKQDENTSARVENEEAEEEVVPHVPPATSEGLRIHSFCKTLTASDTSTHGGFSVLRRHADECLPPLDMSQHPPNQELVAKDLHGVEWRFRHIFRGQPRRHLLQSGWSVFVSAKRLVAGDAFIFLRGENGELRVGVRRALRHQTTIPSSVISSHSMHLGVLATAWHAVNTGSMFTVYYKPRTSPAEFVVSRARYCESLKRNYSIGMRFRMRFEGEEAAEQRFTGTIVGICVSDPSGWADSKWRSLKVRWDEASSVPRPERVSPWQIEPAVSPSPVNPLPVRFKRSRSSVNASPSDVSTVNREVASKVMVESQQNNLPRALHNQGRTQLTGRYRDSTDVKTAQDLTMWSSGTEQQRNNIAAQTKRCLEGWTQSRTPEGYNQLFSAFQPLKDAHNPLRPFPNKISGTRSSTWVTADARYPAQQANHNMLHGTLSFMPHSSGFRMIQQNNLVTPEAANFTGKSAFTSLQGHVTDQCSTGWFGSIESNSHTDHASSSLIRSQPLVIGNDVQKTKGTSFKLFGIPLGSPEKSEPLVSPPSVAYDGKLQTSPTDNNEPCSEATQNIQNKVQSSSTRSCKKVHKQGSALGRSIDLTKFACYDELIAELDQMFDFDGELKSPCRNWLVVYTDNEGDMMLVGDDPWNEFCDMVHKIFIYTREEVERMNPGALNARLEDCLSDSLGRGLASKEPRSGPSTSAVDSENRANLSTLLKVVKQTKGHVSE

SEQ ID NO: 68614 - protein, 367 aa, Zea Mays
MTGEKKMFSSYVKNKDPQDSIIFSDGNQGKVKGLGKITISSEHSISNVFLVESLGYNLLSVSQLCNMGYNCLFTNVDVSVFRRSDGSLGFKGVLDDKLYLVDFAKEEAGLDACLIAKTSMGWLWHRRLAHVGMKNLHKLLKGEHVIGLTNVTFEKDRPCAACQAGKQVGGAHHSKNVMTTSRPLELLHMDLFGPVAYLSIGGSKYGLVIVDDFSRFTWVFFLQDKSKTQGTLKRFLRRAQNEFELKVKKIRSDNGSEFKNLQVEDYLEEEGIKHEFSARYTPQQNGVVERKNRTLIDMARTMLGEFKTPERFWSKAVNTACHAINRVYLHRLLKKTSNELLTGNKPNVSYFRVFGSKCYILVKKGKN

SEQ ID NO: 68615 - protein, 1319 aa, Zea Mays
MYPSPYDGSGAGGKIRRRPHLRAASTPYERPPAAAAAHRLAAAAAAASASSEPGGERGGGGGGWVSRLVDPASRLIAGGAARLFGSVFRKRLAPPPAPSPPLSSPPGRNNEPKQGLPDSTHVDSLPIPEGGMEKGKSIVDTSDVKAMSEVEHLLMRKTFTKVEFDRLTDLLRARTIESDPPKPIVSREEKNEESIKVDGIRGSALRHMDLDDSPAVKVHNHGASSPAELAKQYMSSRYLREPQSSSLRSRLFLENKGEASNTVNDRRSVPPIVQTPLELRNENPGLPVNGYVTSGLRGRSAIYRMSRSPYFKGQNYSSDLNTSSLSQRSQSLHVGGRQVLKRSGAELENELGSIGPIRRIRQKSNMMSSFRDSRANPKGNLLTSHISSTDFTEDGASIQSPSSKKLLVGSSQSLRPLESQKNEGDGKSSDSIPPIPAQSNKMAEKIFEQLNIIAPSPKQQQSVTLNASNSMSKKPVFQDAGSSSMYNQSSSLKFQDLDGANGPHDTNLNGSLLKKDKLNIIKDGSPKAAFSDRPALLGNSVSASKSWTPAFKMAVIEDLPELDDDLEVLIQSSKIEVETTEQKIDSNRKEQKVEQNILEQRVEPNLKNIAGSTISEQPVASLSKTVTSSGGLFLSNDPGKAVPKASVDNNTEFAFSNGPPGTRPATGVSAMPLASVNNDKQTGASNFIFGIKQPITSDFETSTAKNKSTLGQSVTKPTTLASTSSERGDKTEKAEDVANPSEKVLPSAASTTLNAPLHFTSVASTSSLSNGLSYSPPKLTTPPPTDKPAISSAVSTSIFAVSSSSPAISSSPAFTGFSFSSSAPVGLSLVTSAKSDGTTAENKAASTLSFGIGGTKAEVKSVAPDASSKASSELFISPVSSSIASFSSSPATSTPTFTAVAPSSDAAGISVAAPSSTSTAPGLQSASTPSFTFPSSGNNLFGFSSPAQSTGLSTSSLAGSTSQPPAASTLFGSKPTQSDGTIQQTSQSSKPQSGSPFPVMTPGVGASSSGPGTLSFGLGASSTGSGTASFGVGASSSAPGTLSTFGAAAHSSGPGVFSFGAGTSSSGPSTASFGAATSTSGTGFGNSPFGTGATFANPFSSSSSTGFTFSSPSSSAGASTAASTSVFASTSTASSASAFSNPFGSSSSPPSTFTFGQSGSSGNTFAFGAQPAPTFPSQPSLFSFSSANTSMNSSPQPAFGMINTNTAFSMASPGNDQMNEDSMADDTSQAAPAPAPVFGSSFGQQNNSSAAPVFGAPAVQPGGVFQFGGQQGSAQQNPSFPAVGSLEFQGGNFSLGSGGGGGDKSNRRVIKVKRTPKKR

SEQ ID NO: 68616 - protein, 317 aa, Zea Mays
MVESFIEHQDTCNAGRARADPSPACGAGSTGVAAASAGSQPQAPPPMSLSRTASSTSPSSDIVISPVAAWPGSSAPTIPSPATAAFHRFEQVPSPRTPPSDHHHRGGHNLELQLMPPSGSGVVGRGAPGVAEYGVAPRTPAAPPQSHPATMQLQLSIGVCGGGGFGDEAMLAAAREKEEVEAREQLRQAVAEKAAANEARAQARRHAELAEQELASAKRMRRQAQVELSRAHALREHAVRQVNATLLQITCLGCRHKFRARPQLLDAALGAPEVTCSYMSSVVTEGGDAEADDEPPLDGRDGMLQRRRHAMAMDVIL

SEQ ID NO: 68617 - protein, 712 aa, Zea Mays
MASPSLVDTQLIEALEHQTRVILAELDKRFTALDSKWEARVQTHQVAVGAVVEWRPQVDASIEHLQQHQADQPHLRSVGNMPHEGGLLSSAITKQIEPVCLKELALLGDADSRVQATETDVVFPSSKMLSLVGAVDKEERHSTQEVPRRAPRRNALRGGTKPTPSPSSTTTAPLEHPALGSRETWSRASSTLCSSASCSSSRWRACATRRTRAWRPTRGTCNASGRATHSTQAPPSPAASGTSPPPRRCPRRSTGMWRPATTVGVGSTPTSTLLHTQASTAPWVEEQVSGSSPLGCSTKCLCQAMQNIVKPNPPRMNEITGAARLKPQGSFHYGSINGSQIYKMRNEPPVIINGKKRVIVSALVWRIKSLDIMTSYILPKPPWLAFDPGKLFRVDYSSSSTSASLPYALQFSLDVQTMETVDIVVPNQRYTTGEQVSVAVSVAATQGLASVNTMKFQGIIQGVKVAILVDSGSSHSFVSADLASQLSSVVGMVTLVSVQVADGGLLQCYCQLLGAKWMVQQCEFSTNFRVLDISAYNVIVDMDWLSSYSSMKVHWAQWWVIIPYQGSFVLLHGCSAVLPPRFWIIDDGWQETLDYYPETLHQMLVANADGSFKLPGNSVKDFLDSKTALKIHVLITNFQNKLLEVINATELPEFLGGPCTYTMGGCLMSNKGPWNDPDTMKLSHNKEAKFTRHNRGLLLWLVILKGLLTHTR

SEQ ID NO: 68618 - protein, 443 aa, Zea Mays
MKILNLSMILHMTILLKGICLTMMIIIRRAQRTLTEELFTWLLVESSLELREFMQSNILLEIQANGPTQVDNTHMANREDGFDQFDDNMTNQGEGITQPGGKGVNQHRERGLNMGLGLQRMNRARRGKLPIVITEGRIRPVAPIVAAKFATECNIAVRNHVLVLKSWKEYEKHPGLFKLFTAKLSAKFDINTEDALVKNACFQMMRNALRQQRYKLKKQYFDPFPLHLVRKTSPIKSTSDEQWNDLVEHWKGPKNMATCEHNKGNRGKVKFHQTTGSRSYMVHVENLGDKYMDQEPDALDLFKECHYSKKKQGYTSTVQLAITQMEDKRSTPGEGEQPMSTTQVVADVLAENTKKNRFLQNVGIQNARPRSSVQNIEAQLEVERKANAELQSLVSIQRERMDVLLKQVHEAELVRIREQEEMKKKQDAMDAQLELMLSQIQPS

SEQ ID NO: 68619 - protein, 947 aa, Zea Mays
MPPELGMSSRTVAGAVVNRRPRRLFGRSSERKNPLNLQFERQVARLEARQQQQRCVIVTVIPFNFCYDFKSLSLTESANVSHRRWQDNSSRLLEDKPTTSNSMSDSDFLVNSFTKPSDNARPSRRKSKKKSKKHRQRCRKPTDGSEAKFREGNGAASAADVGDCEDSTLSPKHVGDIRFEETSPSSSVKEASEEAPESDDDEYHCCSGGSVSSASYCDEMELSKSTTSCPALCGQCPSSNLQYLDNTQNSAPTGPSQETCYAGSKANCNHDTKSLFIFRNERGSDPCEATEFCSSSSGFDENWIEKFDYDSGICSPKSVGTYGGDQAAHLCSDTTGDNDFCLVISRKRARKEKKMSLWKSYGAHASTPALDRNKKYVGHSSMQMTNEFNSNDWSHRQNHVSRIHPQHGNALKSSTKNFMQRPSIGCRETQYGFPAKESKLGASLNHSTGPREKTCGKLTGGFDKTAQQLYLDRDLSNALNSSESIRCETRSISSSEPTTPKSLKGNYTSESGESTDITIGALPMQKRRLQDLVRTDDASETISGRSSPCSESSTTELIAGHSTDSSIEGNHGCQGLCNSRTHLAQMLRVVNDACKVQVGADVLLAAGYPISDLEKFICSATPVIGRAPCMISNTCSLDQVVSDSVCQHDISNVSLRRIWEWYEEPGCYGLEVKALSNLSSKTSSSSSSEFFAYFVPYLSAIQLFGLSRNNMHHSFGVQGRELLISSNTASSMSSHPVHAKAHTLLEESNACLPESSLVVEDPGELIFEYFETEQPSLRPPLFEKIKELVSSANVSDHRVFGDTEKLQNAKLCELHPASWFCVAWYPVYRVPRGNFRAAFLTYHSLGKLVHKKCSMDTNDGHTQVVSPVVGLQSYNDKGEQWFQLRCPDLKQLPIEDSLKTSPAEVHKERLRTLKMGALAMARAVVPKGSGESVNHHPDYEFFLSRCA

SEQ ID NO: 68620 - protein, 97 aa, Zea Mays
MAATRRIRCPDEKFHCFDQSTAPANATPTSTSPGGPPWASPRGLGDGEARVRSRAASFSSTVERTRASFITQTGNGARDSFLSPCSPSLSFRRSSDY

SEQ ID NO: 68621 - protein, 199 aa, Zea Mays
MRAACACSGRPPTTTRCAWYEDRLAALRSRLCAFWCPPSACELKNLRRQKLQENTLCGGGLAADPDPDPDSESAEQLAASGDGDGDGDSLAPSVRFSHAAPSPCCSLVAGLQPLDGWMVHQKQLAVCCFIKEDEMRCGHMLFFLLTSASGGLSFFLSWRDGTGAEFLLAFACASRDGDDVGTRMCCFGAGGMDRDTEST

SEQ ID NO: 68622 - protein, 290 aa, Zea Mays
MSPIVPPKPLPFLTTLTTRFSLACLPTRRFTQTCCSSAGHRGPAVAATPRPGGVCRVHSPLRSLLLASAATSARTAAAAEDMSDPELRLVLELATDEELMEVEEILYGTSYFSPLLKSIARRPNSDGVVVLDDIEERDHFISKLESRFLYLAADARFVMRGWRPSYRDVLLRVRKKIGVQCSSKLCTADLEAEIFLHLVNEYSSHQKDRLSFPWDKRKSPNNISSLGANKWKMLTDVAWRIGTKGMESTFLKGGSALTMKTIYESLANRLTGKLLKEAANYKIKKELVKQ

SEQ ID NO: 68623 - protein, 255 aa, Zea Mays
MELLEYLGMPVLRAKGEAEALCAQLNNEGHVGACITADSDAFLFGAKTVVKVLRSNCKEPFECYHIADIESGLGLKRKQLVAMALLIGSDHDLHGVPGFGLETALRFVQLFDEDEILDKLHEIGKGVYPFLKGFDNPHIDDLPSSSKKSPIKSPHCSHCGHPGSKKNHIKDGCNYCLVDSLENCVERPAGFKCECPSCDEARDLNEQRRHENWQIKVCKRIAAETNFPNEEIIKLYLSDNNLVEGNKKKKGCSLA

SEQ ID NO: 68624 - protein, 370 aa, Zea Mays
MPTLLSLEVTGDAIEGTTMFASKRYWGGEEGDTMFRWILTNSDGTEKEIEGATSSSYTLKCNDIGFYISVLCKPVRNDGVDGSLVSTEAIGPIIPGPPTCQSLELAGSMVEGGRLTFHAVYTGGLRGSCIQEWFRLHDDGHKDKLTADECLDLDLADIDCRIELMYTPVREDGVHGLPRSVTSDTILPGEPKGVNLILPECFEDNEISPIKTYFGGKEGTGKYTWFRNKEKLDNLEFDLVAESSEVVGETLKYKPSLNDVSSYLILYWVPTRRDGKVGDPLMAISDDPVMAAFPSVSDVHLEQKSSDVYCGLGIYYGGYEGLSLYRWYRESSDGTRLHIDGADSVTYEVTDADYSCRLLFGWDKWRRKTL

SEQ ID NO: 68625 - protein, 332 aa, Zea Mays
MATAARSLHLPGPTPPKSSTPSSHRLPVPCHLRPQRRRLAASSSDLTSFPEPPPATEAELRENGFRSTRRTKLVCTVGPATCGAAELEALAVGGMNVARVNMCHGDREWHREVIRAVRRLNDEKGFAVAVMMDTEGSEIHMGDLGGAPSAKAEDGEVWTFSVRSSDTSLPDRIIHVNYDGFAEDVKAGDELFADGGMARFEVIEKLGPDVKCRCTDPGLLLPRANLTIWRDGSVVRERNAMLPTISSKDWIDIDFGIAEGVDFIAVSFVKSAEVINHLKSYIAARSRGSDIGVIAKIESIDALKNLEEIIRASDGVMVARGDLGAQIPLEQG

SEQ ID NO: 68626 - protein, 100 aa, Zea Mays
MEAEARADQDHGEPFILGGMKPGPRSTPLVSVRSVSIQERGEEEEEEEEEERDRDRSRKRRVAARREERLEKEGAAAAAPSQTTFPSKTKGFLIYPYYGV

SEQ ID NO: 68627 - protein, 350 aa, Zea Mays
MAGTTRCSIRGSNAPGLALPCLLLLLLLAGAGVSNGQLQVGFYSKSCPDAESTVASVVRQSGSADPTILPALIRLQFHDCFVRGCDGSVLIKGGGNNNNNAEVDNGKHQGLRGLEIIEGAKTQLEAQCPGVVSCADIVVLAARDAVAFTGGPSFDVPTGRLDGKVSNLRDADALPDVHDGIDALRSKFRANGLDEKDLVLLTAAHTVGTTACFFLQDRLYNFPLPGGGRGSDPTIPPGFLSELKARCAPGDFNTRLALDRGSENVFDTSILRNIRNGFAVIGTDAALYNDTATVDVVDSYSGLLSNFFGPYFRQDFADAMVRMGSVGVVTGSKQGEVRKFSLQQGHQETS

SEQ ID NO: 68628 - protein, 446 aa, Zea Mays
MSDSASMAAAIEARFSSRDLIGCGSFGDVYKGFDKELNKEVAIKVIDLEEAEDDIEDIQKEISVLSQCRCPYITDYYGSYLHQTKLWIVMEYMAGGSVADLLQAGPPLDEMSIACILRDLLHAIEYLHSEGKIHRDIKAANILLTESGDVKVADFGVSAQLTKTMSRRKTFVGTPFWMAPEVIQNSEGYNEKADIWSLGITAIEMAKGEPPLADIHPMRVLFIIPRENPPQLDEHFSKPMKEFVSLCLKKNPAERPSAKELLKHRFIKNARKTPKLLERIRERPKFAAKSMDATQNGQTHDEEEDFGTGTIKVNRTKDTAPSLSQGTVRKSAVRDFSDRSEGTGTVRVVSRPPQIASTKDGRSDMPQSPKAPIRTADRENQWRSSGTGSEESLSLRDTQSGRGRVESSTDDNDHSVSGSGTVVLRSPRASQLYSTASNHSAKILLL

SEQ ID NO: 68629 - protein, 154 aa, Zea Mays
MLVKVRLWVPCTASVKSGSARLDPLSARRGLWVHVRAVSALTTSRPTTRRHACSALPPGPAASSLRCAPSPAAVSSTHRHRIACYARGACARIVDGALSFSLLAASLLAPSLAMLCCSASCSTCSAHQCLYLIAGRARLCGSSLGASSRDLGSG

SEQ ID NO: 68630 - protein, 264 aa, Zea Mays
MQGGSSGIVYGGLKYQARCIADIRADAGSTTFLAGTLSLKEENEVHLIRFSPAESELVCDGLFYHPNEIWDLKSCPFDHRVFSTVYTSGEGYGASVWKIPELNGQSNSPQLEQLFELSGHTGKIRRVIWWPLGKHDKLISIDDRNIFLWNIDTSKKIAKVISQGSTDMLPNLRGGAWDPHNHNLVAAISDSSLQLWDLRSMEKSTAIEHAHIRDVDYNPKKQNIVATAEEEFGIRLWDLRMLKYPLKDLPGHSHCKDRGFFMVS

SEQ ID NO: 68631 - protein, 633 aa, Zea Mays
MSNPEIHDLKDVMVGNQEKEQKITQTPKLKTFEGPRAACRLDSLKDVFFWGDAFGSILECGDTSKPLPMLVDSTNMLDVQSIACGETHAAIITKQGEVYSWGNESSGRIGNQVNIKVSRPKVVQSLASLHVKDVAYGSKHTCAVTVSGELIEWGEGPYMGQLDSYARNQWFPHKLFSPLDGISVVKIACGPWHTAIITSSGQLYTYGDGTFGVLGHGDTQGTTRPKEVESLKGSRVKCVACGPWHTAAIVEVISDFKSNSPRSKLFTWGDADRGKLGHADKKMKLIPTCVDSLTDYDFIQVSCGTALTVALSVTGVVFTSGSSMHGQLGNPHADGKTVSAVEGLLKSEFVRHISSGSSHVAVVTTNGKVFTWGKGKEGQLGLGDFLNRSTPTLVDALEGRHVESLSCGYNYTAAVCLHKVISRKDLSVCSGCKMAFGFTRKKHNCYHCGSMFCNSCSSNKVAKAALAPDKSRRYRVCDGCFSQLLKVVDSGKVKSELNTSKGAEIIRSYTPKLSRIFRDVNLPVEKEKVALVQRSNQRNEVLYTPVQAKSQRWGQVECPAQFLSAEDSSHYQSISKNHMYSASVSERMHDPTVLKSGRSLQQPNDDQRKDLNSIEETLLTEEVKQLRSQELGP

SEQ ID NO: 68632 - protein, 190 aa, Zea Mays
MASSLAEEEEAFEHTLLVVREVSVYKIPPRTTSGGYKCGEWLQSDKIWSGRLRVVSCGDRCEIRLEDPATGELFAACFVLPGQRESAVETVLDSSRYFVLRIEDGRGKHAFVGLGFNERNEAFDFNVALSDHEKYVKREQEKETTGAGGEETGGGEIDIHPAVNRRLKQNLPSSAEPGQTKSTGAGWAAF

SEQ ID NO: 68633 - protein, 781 aa, Zea Mays
MISPRNLPILSGNLRSASPPPKGSSKTPIKSLSSPIAGRSTAAMGQRIDINWTEVFGKSSSPDREADVCFASPSSASAAPRTRARALGAAKVLPGDERRRGSPDRHQRKRLGKLRIDDDWSVGGQRHTAVHGDDGARRPRTRGAAKAADGRVQDAHSVSKDVYDFSPEDEQAERVGNRFCSRLTPIQENKYCQLPLNNLKRQGCAEKRKPISVDKMYSESDRPSSTSSSAKRTHAIDPEVSDHEKCHKTESSHPSRFSKRRKEQLQNSSSVYPRKVQDVVLLDDEDMQPEEEVNCDMSDGQNGPKIYYPSRDNRESVELSRSDIKCLDPGVYLSSPVINFYIQYIKRNRLSSEDFRDKFYIFNTYFYGKLEEALCRQDEFSKLRRWWKGVNILNKAYIILPIHGMAHWSLVIICIPAKESISGPIILHLDSLAMHPSTKILNTVERYLEKEWCQLSSWEDFKNNIHKQSVEVPRQNNEYDCGIFMLYYIERFIKEAPERFTIDKLDMFNRSWFKPEEASGLRRRIRELLLEEFESAKLDDALPGADASERDDSINDGELKPDASSDSSEMVVEVVGGLGGTDKSNEGIKVVASEEASGESGDAGKSTEGTVAASEEKSIEGINVAEPEDACESIGGIYVAESDEASGEFGEIGKTNKGTKVAVSEGASVSGYTDKNMEDISDSEVAVLDKAPTSSYRRGEKTTACVLSEAASLSDSVKDEQGMVKPDSGSSKAEREGDLIVIASPERSEGNDEIIGSMPITDVVCDSCDSDTETKILVMIF

SEQ ID NO: 68634 - protein, 327 aa, Zea Mays
MGGFSGMDQSAFRTSRRSTAIQGEDIRYDVILGFTEAIFGTEKDIILSHLETCDTCGGSGSKAGSKMRICSTCGGRGQVMRTEQTPFGLFSQVSICPTCAGEGEVISEYCRKCSGEGRIRVRKEIKVKIPPGVSKGSTLRVRGEGDAGPKGGPPGDLFVCLDIEEPSDIKRDGINLYSTVSISYLEAILGTVMQVRTVDGTSDLRIPPGIQPGDVIVLAKQGVPSLNKPSIRGDHLFTVKVAIPKRISGRERELLEELASLSNGRFARTDTKPKPAQPKAIHQEKEVGASQEDTSKSKEAEGDWLKKLTDFAGSIVNGAAKWLNDNL

SEQ ID NO: 68635 - protein, 65 aa, Zea Mays
MDMFFKDVSCIDYFSSKMKLMVLKLLHRLWNSRGCGLWLDHKEWGGSFLSALPFFADKELCIVYS

SEQ ID NO: 68636 - protein, 1030 aa, Zea Mays
MDVPTPPNRAGCNSNISNIGSPMQSFDDPFGGAAMTSFDGYSELSSPSVADHIFSLLNDPSSVQHMFALWSSSGSSPRASAVREDMSFDTYPGPMDVTASLAQRINSASVFNPTEVDRGLKDSDGLVPNNGSQQGSSIIPRSVGNILADRMLMALSLFRKSLSDGVLAQVWMPVEHNGRVVLSTSEQPYLLDQDLAGYREVSRNFLFSVKEEPGLHLGLPGRVFISGVPEWTSSVTYYSKPEYLRMEHALLHEIRGSLAMPVYDPSKGSCCAVLELVTNKEKPDFDAEMDIGVNLQTTTDRSNQKVYSENQKYASTEILDVLRAICHAHMLPLALTWIPTSNGTANGFCVAKNIRLDSQPGKSVLRIHESACYVNDAKMQGFLHACAERHLEKGQGIAGRALKSNLPFFSPDIREYSIEDYPLAHHARKFGLHAAVAIRLRSTYTGKDDYILEFFLPVNCKGCGEQQMLLNSLSSTMQRICKSLRTVSEAETDSVSATEPMYEKTNGSCLPTGNSESSSHDDQPITESAFHDLSSGDKQGDREPAKARSSSKRVAEKKRSTSEKNFSLDVLRKYFSGSLRDAAMSLGVCPTTLKRICRQHGISRWPSRKINKVNRSLKKIEKVIKSVHGVDRSLQYDPATGSLVPATSLPDKMPTSSAGVKTVEEKSSPEPGQDFSSPDGWQRESSQLHASSIPTRVGDEVQMLAINNEGSRNYASGIANIAQHSNSEDAHGPLYPVGAVNSSRTGETGYIDSPTSLHMDSVEGQTTVRDSRSVQQADVTMATKEQTLPSTSGTTDSSSGSASSQPAFKGNPGRALKVSSSDALTVKATCNGDTVRFKFLPAMGWYHLLEEVAKRFKLATGAFQLKYKDDEDEWVILANDADLQECVDVLDSIGSRSVKLQILFLTNLLVVKPRCDMALPSRCSHEMLGKNQGEKVGGTSRGRHNNMWRGIGSRGVVAGWHRVEWEMHKKGMEIRRAQGRRRGQRVRVTQQEARDRDREGSRKMWVVMVKEEGIVGDECFDGLDRGIGQL

SEQ ID NO: 68637 - protein, 157 aa, Zea Mays
MLLAHASATRLYREKYQAVQKGVVGINIYTMWSYPLTNSTADLEATQRFLDFYSGWILEPLVFGDYPSVMKKNVGSRLPSFSKVQSEAIRGTLDFIGINHYYSFYVNDRPLEKGIRDFSLDIAADYRGKTVCHSIHDYPFIACNSLDTFPGTSDSFI

SEQ ID NO: 68638 - protein, 603 aa, Zea Mays
MNHQFAAGIQTIAIIPVLPRGVLQLGATSVVVENTNLVLQYKKLCSQLNNRSSMASSSSVKNDLNPKVQSHPLNGPTSIYPADTRSKFFSGSPMSYQQCYGPDGTTVSSSILTNMGSNASMLMVAQRNAQVGKEHILYAPDMRFRLQNPYCDRRVESNTQSSVVSSGFISSISASMERHPWMTNSQQLEQGNTGEPSDLRNVLLKSLAYRHPLFNDNTNMVLVHGKGQVPGFVNGHGGFDFLPEGTMVFKGNLYGSTANQILDQRCSSTSEMSGHRPTISYKMPQSTQCVRKTESPKRETCETSAALSSGSDIQVSGGLKTVISQENNMSSSDLISPKKPNEVHAPTGAIVKAVKNMDSRRLPDISNERSPPLRMDAAAESDLFDMFDSEVHHLCRNVDNDLTCKAAKPENSNRDVPESSVRLGSSSSFNSVDDKFPYSGIFSLTDTDQLLDAVVSNVNPGGKQISGDSTSCKTSAADIPTTSYCRLKEPKQSESSSPLLIKNELAVSNFVKQSSFQEKAEDGCLSQNNAIQKSQIRLWIENGQNMKCESASASNSKGVDMSSKASRKRSRPGENPKPRPKDRQLIQDRIKELRELVPNGAKY

SEQ ID NO: 68639 - protein, 383 aa, Zea Mays
MVNFGKKLMADQVEEWKGYYINYKLMKKMLKQYVQQTQHGGKDREQVLKEFSRILDDQIERIVLFLLQQQGHLASRIEELGEKRSALEEYDISQVYQLHDAYREVGLDLIKLLRFVDVNATGIRKILKKFDKRFGYKFTDYYVTTRANHPYSQLQQVFKQVGIVAVVGALSRNLEYLQHHEGSFVSIYDRPAVTLKAQLLIYFMLKYAMEILLSESSVVTTYYFSWSTSSVAIFLAILGLTVLPVNAIVGSYITNLFEDRQILLASEVMVLIGIIMSFRFTPHYSIPQYVISALITFVFSEVLEGVNLSLLSRVMSSRLSRGTYNGGLLSTEAGTLARVVADATITAAGYLGTDLLLNVTLLPPLVICIVSIAATLYTYNNLY

SEQ ID NO: 68640 - protein, 892 aa, Zea Mays
MAVAPVVRQQSLTEGLISCRTDVQCLHRWQKVLNPELVKGPWSKEEDEIITQMVNKLGPKKWSTIAQALPGRIGKQCRERWHNHLNPGINKDAWTQDEEIRLIHAHQTYGNKWAELTKFLPGRTDNAIKNHWHSSVKKKVDSYRSSGLLAQSQGFTPVEYTAGGLNVDSSSAITNQISEGSGFNVFREAEDSMELSQSSFAKGSCSQEEQNDVTLGSHLHVHESLCPDGSTNDGNGASGLPDIHHRLCTSDMDQDKHLQEGMDLDKHLQHEFSQGTDLHLDVDEVPNNFVIKGSQSSNELAVQFHDTEIMNSSKNDGVSLVPHAITPCVPILPSVSGCVHNINVIYEMGIKNDNCFQSEKCQDISIQSGAYSSEAAGSFLAPLYPLQTSEPAIMMGGPVYYQSSVMSLPPGFISSDGASNASGVKSETSYYPVSRQNLEIKTCHNASGDPEQNSYISSEDDRNKTSEPMGRISESEKKQQVDVEQSCLEPAACIGKEALSSHGDTILSKKEDAGALCYEPPCFRSFEFPFVSCELVNSSDLPEYSPLGIRELMRTSLNFPTPVRLWGSPTRDGSPDAVLKNAAKRFMCTPSIMKKRHRDLLSPVSDIRTDKKPNTERDFMSSGISSTRVGKSCMDSADDSADLVSPKESAFQKKLKLCHENKENLNEIADQGENEANAKHSSGILTPSSVDNHNTHKHGPNFRIQELNTTVQALSNSKDIIFSRSKPSEHVEKSAACIDADYEYLNILADTPGIKRGLESPSAWKSPVFTPFQDAYFMSPASRAFDALGLVKQINEQSASAVEEAHEVLANGSPWKQHNKENSDKENIENTALKHEHVTSKPPSILMVEARVLDFNECSTPVRKKDDKKVEIVLGGPATSPVTSSHLWINMR

SEQ ID NO: 68641 - protein, 63 aa, Zea Mays
MPFSFSSSCALLGELVKLSPCTTIAFVEPMHLCLPHSTTAPIDPERITMPKRGGELGFSKNQH

SEQ ID NO: 68642 - protein, 868 aa, Zea Mays
MCTSVASEQQILAVGCSRGVVELYDLAENTRHIRTISLYDWGYSVEDTGPVACISWTPDNCALAVGWKFRGLTVWSVSGCRLMCTIRQTGSNSASSPMVKPSALKFEPLMGGTSHIQWDDNGYKLFAVEESLSERVLAFSFAKCCPNRGLSGTTYSHQVLYGEDRILLVQPDDADELKILHLNVPISYISQNWPVLHVVASNDGMYLAVAGSHGLVLYDLRNKRWRFFGDVTQEQKIQCKGLLWMRKIVIVCNYVESSNTYELLFFPRYHLDYSSLLYRKQLLGRPIVMDVFQDYILVTYSPFDVHIYHVVVSGELSPASNPVLKLSTLRELSIMSPKSPPVSMRFIPEQNDKGALTEDTHGFSDLLSQQPSRCLILRTNGELSVLDMDDGHEHTLTNSIELFWVTCSQFEEKGSLIKEVSWLDYGHRGMQVWYPSHGADRFKQEDFLQLDPELEFDREVYPLGLLPNVGVVVGVSQRMSFSTAEFPCFEPSPQAQTILHCLLRHLLQRDKIEEALLLANLSAEKPHFSHCLEWLLFTVFDADISRPSASKNQASQKVDSPKKSLLEKTCDLLRNFPEYMDVVVSVARKTDGRHWADLFSAAGRSTEMFEECFQQRWYRTAACYILVIAKLEGPAVSQYCALRLLQATLDESLYELAGELVRFLLRSGRDFENATSDSEKLSPRFLGYFLFRSPYKRQSSDLKSNSTKELSPHIASVMNILERHASYLMSGKELSKLVAFVKGTQFDLVEYLQRERQGSARLENFASALELIGQKLQMDTLQSRLDAEFLLAHMCSVKFKEWIVVLATLLRRTEVLVDLFQHDLRLWKAYSITLQSHDVFREYLDLLNILEEQLSSVSDLTLQNGPLS

SEQ ID NO: 68643 - protein, 131 aa, Zea Mays
MPPPPPVNPQRLSPAESRERTLYFFHGLGVDVPLPVSAERPDAYTSLVRAIVSSAAVTSSRVSCTLTVSPAVANQYNTLHGGAVAAVAEAVGMACARAAAGDKEMFLGELSTAYLAAARLNICSIWLIQDQ

SEQ ID NO: 68644 - protein, 264 aa, Zea Mays
MLLLNKEAMGENRKITRGSRLVTNKLLHRCQQLHGHGSVSGVSETLGKRPLNGNKDTLVYSVFASTWNVGGVTPSDGLDLEDWLDTRANAYDIYVLGFQEIVPLNARNVLGPRKSRVSAKWNSLIGEALNRRCREEGGANTNSSAKDDEGSVEGSQGFRCIRSKQMVGIFTSVWARSSLRPLIRHLDASCIGSGIMGCLGNKGSVSIRFVLHDTSFCFVCCHLASGGKQGDVLLRNLDVADILARTRFPGPAAHELPEKILDHE

SEQ ID NO: 68645 - protein, 64 aa, Zea Mays
MYNPLHSRQRRRRKKTLHLVGSPSTPSSSTMRRWHSSSRAFTKSSSKEGEGLQAPLQESLLQVW

SEQ ID NO: 68646 - protein, 638 aa, Zea Mays
MQHARTEQNGPFFVRKANSQIGSGSECRRHQKRYPLGHFLVPLMSFCGMRLLRRPELGTLPDVMALTSPGERAECRREAPQRKNGGVQEGVKGLKSLGVRDLSYRLAFVANSVQVADGRREVDIRERDTDGDDSERQKFTEEEEDEVVRMRNTPDFFNKIVDSICPTVFGHQEIKRAVLLMLLGGVHKITHEGINLRGDINVCIVGDPSCAKSQFLKYTAGIVPRSVYTSGKSSSAAGLTATVAKEPETGEFCIEAGALMLADNGVCCIDEFDKMDIKDQVAIHEAMEQQTISITKAGIQATLNARTSILAAANPTGGRYDKSKPLKYNVALPPAILSRFDLVYIMIDEPDENTDYHIAHHIVRVHQKREEALAPAFSTAQLKRYISFAKSLKPQLSSEAKKVLVESYVTLRRGDSTPGTRVAYRMTVRQLEALIRLSEAIARSHLERVVLPAHVRLAVKLLKTSIISVESSEVDLSDFQDAEDGTNVPSESDAGQPAEEDAAPQQQGAENDQAADNGKKKLVITEEHFQRVTQALVMRLRQHEESVKKDGDGLAGMKQGDLIIWYVEQQNAKGAYSSTAEVKEEVKCIKAIIERLIQREGHLIVIDEGTAAAAEDGSGARRTSESRILAVNPNYVID

SEQ ID NO: 68647 - protein, 258 aa, Zea Mays
MDKYWEETQRYLEYEELSIYLEAQEDAMSCYDSSSPDGSISHSSSSAAACGNKNILMERDRRRKLNDKLYALRSVVPNITKMDKASIIKDAIEYIQQLQVEERRVLQELRVLDDDTAAAATAQVECCDVDGGLLRREAERAKKMKRAQSVASGAQSAPPPPPPPHVEVLELRVSEVGDHVLVVSVTCRKRRDAMARVCRAIEDLRLRVITANVTSVAGCHVHTVFVEVRRRWHGIWHHMGSGYSVFFSPFFILDDGYD

SEQ ID NO: 68648 - protein, 337 aa, Zea Mays
MRPAGAATTVKKARQELELEQERELRFPQAAAAADQGGLDEELRRGPWTVDEDLTLINYIADHGEGRWNALARAAGLKRTGKSCRLRWLNYLRPDVKRGDFTADEQLLILDLHSRWGNRWSKIAAHLPGRTDNEIKNYWRTRVQKHAKQLNCDVNSKRFKDAMRFLWMPRLAERAATAAHQPQPQHVAAACNNVLVAAAAAANSSSCCWSSPRSSAVTTAACSGSSSCSSLTSESAHNDDDGARPHAAAVLAAAAAATGDDDYWGAVTTTMQQNHHQQQQQNEQFDFWSTASALQHLTTAAADQDLTGWVQGFSDDGILSGSSSDSLWSLDDIWRMQ

SEQ ID NO: 68649 - protein, 424 aa, Zea Mays
MAIPVRSAAAPRRLVPSIPPASSGHVRGLACFGTRTGPRGARGLSMVVADSTSRRAKQADGGDGVLGAPVLGGLGMEGLGDQLSVVMKFGGSSVSSAARMAEVAGLILTFPEERPVVVLSAMGKTTNNLLLAGEKAVGCGVIHVSEIEEWNMVKSLHIKTVDELGLPRSVIQDMLDELEQLLKGIAMMKELTPRTSDYLVSFGECMSTRIFSAYLNKIRVKARQGPCNQPSCKSPYDAFDIGFITTDEFGNADILEATYPAVAKRLHGDWIQDPAIPVVTGFLGKGWKSGAVTTLGRGGSDLTATTIGKALGLREIQVWKDVDGVLTCDPNIYPHAKTVPYLTFEEATELAYFGAQVLHPQSMRPAREGDIPVRVKNSYNPKAPGTLITRQRDMDKVVLTSIVLKSNVTMLDIVSTRMLGICYI

SEQ ID NO: 68650 - protein, 189 aa, Zea Mays
MERRGQQPGDAQQPGKDGAGDSPPPPPPFLEVSCRSSGKVRRFAAGTTARYALHAINRKLGPGAPPALHVEAVRDGEEPVSFGPSAALADYGRGWRLQTVTAHDAPGIHHAPHADTKQGDRQPSKEDADGTETVRGTCIYVAKIVLAFAFLFLLGGSLTYLLEVIPDMLQTASALELTDFFYDPLTENV

SEQ ID NO: 68651 - protein, 291 aa, Zea Mays
MVAMQELMLFMRRVGAGREGAELGTQDLAGSGMQDGLALRIGPAQCRKRKLKVSVVAVPKTIDNDILFMDKTFGFDTAVEEAQRAINSAYIEARSAYHGIGLVKLMGRSSGFIAMHASLSSGQIDVCLIPEVSFTLDGEHGVLRHLEHLLNTKGFCVVCVAEGAGQDLLQKSNATDASGNVILSDFGVHMQQKIKKHFKDIGVPADLKYIDPTYMVRACRANASDAILCTVLGQNAVHGAFAGFSGITSGVCNTHYVYLPITEVITTPKHVNPNSRMWHRCLTSTGQPDFH

SEQ ID NO: 68652 - protein, 253 aa, Zea Mays
MVWGTSRSLGTLQHEGEAIRCYKKAGDLHDAKSRVEDIWKKMNSGFPNKMPKPAMTKLSTTEKQKKNKPTNNWMTVLGLSPSKAHSVDQGSKNGLQQTQHEMSEDAKKLAAKALAAAKNAAAVASGRGKVEITEVRDFAGKDIEIKKLVDANSKEAIEKARAGGAAPSAVDNILEQIRKKQKLSVLDKTKKDWGEYKEENRGLGEELDAYKKSSNQYLDKQSFLQRTDYREFERERDARLSMMAKRRTDTRED

SEQ ID NO: 68653 - protein, 59 aa, Zea Mays
MSKPGLRHIHCLCAHATASVPQHTPTTRANVKFGQLSLTRGRPCSLRTCELVDVVSLGA

SEQ ID NO: 68654 - protein, 203 aa, Zea Mays
MPKRTTHTYSSEDALPEGPESDLFVYYCKHCASHVLITDTQLQKMPKRKTDRAHVLDKAKHLSRLNVKEAGKVMLKRGEGKLEKQFRMSCVGCDLFVCYRSEEDLEVAPFIYVIDGALSSVAAETNPHDAPVPPCITQLEGGLVQVAIEVEDRAQRSAITRVNADDVRVTVAALAARGEANSELLEFMGKMSMLMACESRFLA

SEQ ID NO: 68655 - protein, 517 aa, Zea Mays
MESYIRPGCVILTIYLRLPNWMWDELDDDPASWIEKLISISNDGLWRKGWLYARVQDCLTLSYNGSLMFASPWQLVIGDKHQRLCVTPIAVACSSSVKFSVKGFNIVQPTTKLLCVFGDKYLIQEETQMLLEDSTVQQGPQCLTFSCSFSCTSGRGFIEVEDYDQSSLCVPFVVADKDVCSEIRMLEHGLNLISFDETSERIDDLMAYRNRSLHFLHEIGWLLQRSHVRATSEQPQYCPDRFPVERFRWLLSFAVDQEWCAVLRKLLNTMFQGDIDLDVPSPIEFALGENVLLTAVKKRSKPLVEFLLRYTATDYAPVGSGAGAPVQFLFTPAMTGLSNITPLHIAATISDATGVLDALTDDPRQLGIKAWKNARDATGFTPEEYARKRGHISYIQLVQDKIDRRVSRAHVSVTIPSTIDTAGKHASRLKPADQITFGVEKKQRGMNQTLSCRQCVQQVQQLAFHSRTNRFLSNRPAMLSLVAIAAVCVCVGLIMKSLPQVGGMRPFLWDKIRWGPN

SEQ ID NO: 68656 - protein, 861 aa, Zea Mays
MLEDFFTLTEMKEGISTVARITELISEMRKLENSVDINTFDVIRQCSTAANTLASTKNEECLQHFVQLNGVSILNHWLQDAQNCGGDVSNPAAEDLIVAILTALDCLPISNEQSVSCGVMPTVGHLLAHRIAVINQKARALCHKWGGVPKHGTNGEHFHTEESSHTDQLKSPDAGHKTETKRKCVVDEGEPDEESKPEVTTHSDAPLSDPSLTNDNADATEQPAGLTSPNPSNGNATLGDVNNLVRSPTSAGHVGLEDGQSTPNEISSNDAELPINGILRSNSTNAKSGTGQDAPVESTPVAMSVDHNKPGKLFPGSKMGLEDSIISVSSSIKESQPFAAGRSHLEKDTTETLNHLAVVTRDLQDLSEESTSKEDEPTSSSSTDDMDMSGDYILQRCMSSFGGSSKAADTKSTALEGEKSTRMADFDDTDALEVARLVAIEVEREVIDYREPFCSSPDTNSRNADSPDLEGPRQPVAIASELNDNKSSSTEAKSGSSSSHKEDGSGITDGSGPLSRKHTHSVDLGNLDLNENQCAEETDFNPKSILSNSVNLSMPIAVAASRGSSVFPARLHFEGGLGWKGSAATSAFRPAPPRRTPDAEKSLSASSHKTSNILFDLNVADNGSATSGEPLSTAILPASSELPSEVASKAVDVSGGLKLDLNFSCGDEEDAITASNVPSLWNHQQFNGNWSQPSFSSSKQPAARNFDLNDNMSIADVSVRGMDGSSVKTPSRPRDMSDHSAVTIMAFFAPGGSPYLVDAKGAPVIPPLSGLSLGISHPSFNTRATQPSSNELSYFHPSVDFSYGVSSEGARREAGSYWPMSYQGQTMFVDERMRNVSQDGTSGLVLKRKEPESGWDLYPRR

SEQ ID NO: 68657 - protein, 427 aa, Zea Mays
MVSLSHPHRSGKALSCCTFPSGSGLDSHLLFPSMRAPAGGASATALAAAMNIKQPLHGASTLFALLSLSLLLLRLLLRLRLAAFRDAALSLHLLARLRLRPVLLCLPSACHDGGAGAGATTLRVWCPAAPSSKPPLLLLHGFGGDAKWTWARNLPRLSRHFHVYVPDLVFFGAQSRSASPLRSVAFQARCAAEAMRLLGVPRYDVAGISYGGFVAYRMAAAEARDAVGRLVIMTTGVAATPGEMRAMAAREDRTVEDALLPDTAEGLRFLVRRSMHRPPPWMPDFVLDDFIQLMYVDQKRERAELLHELLKTGAGFDPLPVLTQKLFTQNRERLVHLLKGITVGTEKFQVTPISQEVLIVWGDHDQLFPVEKAFAVQRALNGTARLEVIPKTGHAPQLEDPARFNKVMLDFLLASHKPDPSVSGSAQ

SEQ ID NO: 68658 - protein, 112 aa, Zea Mays
MRQISRSVCHFGTAQPSPPSAKTAPGRRCHAYLCVARYALLLLRPVQRLEDDATVIGHDLVHAHKLFDGTSHWNVLLIRKNKGDAVPSVATQLCRLISAGKDWYGSFKGRMQ

SEQ ID NO: 68659 - protein, 117 aa, Zea Mays
MQVDYSGSTYIFSCIYSCFYSVLHSSLQLSNVSVCLIAYYPIFLRKNLFGRTSSSIEFTTSFDVLIHEIQTCIYLFWTAFQRKKCSLVMWFYRPISICVMHLPVYVQLMSIILQVCI

SEQ ID NO: 68660 - protein, 269 aa, Zea Mays
MQRQTAQTARSRTDSTIHHVGARAISVANSLTHTGPEGARYKKNSWSSWDGGVGVGRASSWTSKQASKPIMASHSHRSRSPTAPCPSWGHAHAPRCRRRLVRALLLVAALALAAAGGGGRGSAAAAAAATQQRIPAIFMFGDSIVDPGNNNNRLTEAKANFPPYGQDFPGGVATGRFSNGLVPGDLLASKLGIKELLPPFIGTDLQLEDLLTGVAFACGGSGYDPLTSKLANKTVTTTTYVTIETVGAAAGADDPVERRPAPAVPGLQG

SEQ ID NO: 68661 - protein, 923 aa, Zea Mays
MPLRLDIKRKLAQRSERVKSVDLHPTEPWILSSLYSGSVCVWNYQTQTMVKSFEVTDLPVRSAKFIARKQWVVAGADDMFIRVYNYNTMDKVKVFEAHTDYIRCVAVHPTQPFVISSSDDMLIKLWDWDKGWVCTQIFEGHSHYVMQVTFNPKDTNTFASASLDRTIKIWSLGSPDPNFTLDGHSKGVNCVDYFTGGDRPYLITGSDDQTAKVWDYQTKSCVQTLEGHAHNVSAVCFHPELPIIITGSEDGTVRMWHSTTYRLENTLNYGLERVWALGYMKGSRRVVIGYDEGTIMIKIGREVPVASMDSSGKIIWAKHNEIQTVNIKSVGADNEIADGDRLPLAVKELGSCDLYPQSLRHNPNGRFVVVCGDGEYIIYTALAWRNRSFGSALEFVWSTDGEYAIRESTSRIKIYSKNFQEKKSIRPSFSAERIFGGVLLAMCTNDFICFYDWAECRLIRRIDVNVKNLYWADSGDLVTIASDTSFYILKYNRDVVSSHLDRGGSAGEEGVEDAFELLHEINERVRTGLWVGDCFIYNNSSWRLNYCVGGQVTTLFHLDRPMYLLGYLANQSRVYLIDKQFNVVGYTLLLSLIEYKTLVMRGDFDRANDVLSSIPKEQYDSVARFLESRGMLEEALEIATDTNYRFDLAVQLGRLEIAKAIATEVQSESKWKILGELAMSSGKLEMAEECLLHAMDLSGLLLLYSSLGDAEGINKLASVAKEQGKNNVAFLCFFMLGKLEECLQLLIESNRIPEAALMARSYLPSKVPEIVALWKKDLQKVNSKAAESLADPNEYPNLFEDWQIALNVEAAVASKRSIYPSAEEYMIHAERSNESLVEAFKNMHVHEEMVPDDNEDTVHEVIEDGGVESQEDAVEVDAEDDGVEESQDEAVEVEAEGSSDGAVLVNGNSSEEQWGTKNEEPSA

SEQ ID NO: 68662 - protein, 552 aa, Zea Mays
MEAGPPGRPRLGHHRWSHACAPGNVICKAGWAAPNLWALLGWLIRFISHSVISGFTTASAIVIGLSQIKYFLGYNVTRSSKIIPLIESIIAGADEFSWPPFVMGSIFLAILLIMKNTGKSNKRLHFLRVSGPLTAVVLGTIFVKIFHPPAISVVGEIPQGLPRFSIPQGFEHLMSLVPTAVLITGVAILESVGIAKALAAKNGYELDSNKELFGLGIANICGSFFSAYPATGSFSRSAVNHESGAKTGLSGIIMGIIIGGALLFMTPLFTDIPQCALAAIVISAVTGLVDYEEAIFLWAIDKKDFFLWAITFITTLVFGIEIGVLVGVAFSLAFVIHESANPHIAVLGRLPGTTVYRNTLQYPEAYTYNGIVVVRIDAPIYFANISYIKDRLREYELNLPSSNKGLDVGRVYFVILEMSPVTYIDSSAVQALKDLHQEYKARHIQIAIANPNRQVYLLLSRSGIIDLVGAGWCFVRVHDAVQVCLQHVQNSSSNALKLPVQASGVLTDSVSTPKPEQQHQKQHGLFKDLWKAQDSNADAGGEVQPLLRQNLV

SEQ ID NO: 68663 - protein, 381 aa, Zea Mays
MSVSHADEHEISLCDPSSEDDRRRRKIGSLPLKAIHALRKKRARRRVTDFRFPAAISIEDVRDAEEERAVAAFRDRLAAHRLLPDKHDDYHMMLRFLKARKFDSDKAMQMWSEMLRWRKEFGTDTILEDFEFDELNDVLHYYPQGYHGVDREGRPVYIERLGKVDPNKLMQITSVDRYIKYHVQEFERAFRERFPACTLSAKRHIDSTTTILDVHGVGFKNFSKTARELVQRMQRIDSDYYPETLHQMYVVNAGSGFKLIWNSVKGFLDPKTSSKIHVLGSNYQSRLIEVIDSSELPKFLGGSCTCSEKGGCLRSNRGPWNDPVIMKLIHSMEGGSTREIKQVSDGDERSGSSLRAENLKARACLVTYQMLNLSRMLMTLV

SEQ ID NO: 68664 - protein, 537 aa, Zea Mays
MISAGRSRRRGRAPASLPTTTTAASRRTEHSISCCYCDCKIYSLNDALFNLGWKYARYMRAWFSVGVYLSLIALVSISLMLLWESIGVFYFRSGFLSAWLQNLLTSGLNISIVDTTIIIMSTILSIVFHEFGHAIAAASEGLQIEYVAIFVAVLFPGAFVALNYDLLQNMPLFSMLRIYCAGIWNNVMLCTACVMITLLLPVMLYPLYVSGDGLMVMEVPEISPMSEYLSTHDVILSVDGLKITRTDDWIKILNQGTTAKSRDPEFLEGSHRYVATSSTKGYCVPDSWIDASKNLWQIRDKLPCPDELIAFEKVICNVSTILTEKTSIGSDQKEVEGKYCLIAKDVVKLRRCGNGWHMTEDDESSCACFEDEHCLVPVLNPGFSWIEVSYARPYSLRCLQKGGNLLSSHTANSNFGQSPCEGSFVYVGDLSSAARSVRLSRYRPRWALLLFIADIPYILENGLSSLLHASAALAVINCLPVYFLDGEAILETTLSYVAWFTPRLQRRILKVCSVVWTGLLVITFSSICYSTVLHYGV

SEQ ID NO: 68665 - protein, 310 aa, Zea Mays
MVHGLLHLLGFDHEVSKVAEEEMEKEEEHILNTLEWRGKGLIKSAYDIATVMEHLQNSVEADSNIEKVILQEKHQPKLSHIICDIDGTIMDYEGGLHEKSIGSLREAIATGVNVIMVTGKSRASTIRTFKLLDFREKGDFISETSPGVFLQGSLIYGRDGKKVHRAELDLDVCKEALLYSLKHRIPLVAYCEEQCLTLFEHPFVELLHTVHNENKVKVMHSIEDLLEYSSIQKLLLFDSTKEDSSVLRQHFSELSRGKAHVIKMHSNTIDIVPLNTSKGGGLRILLDHLGITKDCDLDSIGDYTRWLSNK

SEQ ID NO: 68666 - protein, 240 aa, Zea Mays
MAAAPLLGVSWCRASARARSSSNFLCPAGFLYAEALLDRASLGSSSPSKLSCRARLPWRAFAELVVVVSPCCRSRAYCRARPAPFVRALLPRRARPCAPRSRAALPACRCSQLALSARRAPLSWFSASLSRAQHFVVPRRAEFSSAPSRVLFPAYQCVLSARSVLIPNRVVDLVVRRRSSSSSPSSIHPCVRSSSIGLRVCLSFAVESSNPLSVAQPPPRQLALNTISSSASHQETLRIG

SEQ ID NO: 68667 - protein, 352 aa, Zea Mays
MEIFRKLDGLARDIERSQPPVDLWRKFVYCTSLSGSVLGSVDHMKQEDFDKVISPVSVAHFSQYKLVDLLLKKLEGIGFQTCFPSEIGNSTQDLVLESKILMGHKCTSLDQTDEGILVGASVNNGGMIIERKLHCGLLIGTDGARSTVRELAGISMEGERDLQKLVSVHFLSRDLGRYLSSQRPGMLFFIFNPGAIGVLVAHDLENGEFVLQVPFYPPQQMFEDFSAKVCEQIIFKLVGWEPADVHVLDIKPWAMHAEVAEKYICCNNRVILSGDAAHRFPPAGGFGMNTGVQDVHNLAWKLGLLLNGVASPSILQTYESERRPVRIFSHAFCSSNRGEFQGSYVYSYNPWP

SEQ ID NO: 68668 - protein, 85 aa, Zea Mays
MPMIGMNGKKKKKGGSPPKLKGGLLPPRDGGVHAGVRAAGGVGLSAGSIGALPPWCSRSAMVAATAEPPLAAAHLVKKARREPRT

SEQ ID NO: 68669 - protein, 379 aa, Zea Mays
MSAQQKFGINYGQIANNLPDPTQVATLLRSMNVNKVKLYDADPRVLTAFANTGVEFIIAVGNENLQTMAGSPAAARQWVAANVRPYIPATRITCVTVGNEVFSGNDTATMASLLPAMKAVHAALADLGLGGQATVSSAHSVNVLAASFPPSSGAFREDLAEYMKPILDFHAQTGSPFLINAYPFFAYKASPGSVSLPYVLFEPNPGVRDPSTGLSYDNMLYAQIDAVYAAMKAMGHTDVGVRISETGWPSRGDEDETGATVQNAAAYNGNLMQRVAMSQGTPLKPNVPVDVYVFALFNENMKPGPTSERNYGLFYPNGSPVYALSAGSGGGSGPGGSLNPYYTSMFSSSSRSAVSATFLTERVMLLLLLQATVILRHYC

SEQ ID NO: 68670 - protein, 662 aa, Zea Mays
MDASPLNPPPLVEEELVLRRSARCLNRPTRPSYAEQEPPKKPGGRGRSKRKRDEEKPELAPAQQGAKSPDRKDSKDEAGEKKPTPMIAALPVSCAGVAAEDDATGTGKSAKLRVKETLRAFNSHYLHFVQEEQKRAQAALQEINAKSGLKRQTKGGEKKRPSKRPDLKAITKMQEMNAVLYPEKTIGHLPGIDVGDHFYSRAEMVVLGIHSHWLNGIDFMGLKYQGKEYSNLTFPLATCIVMSGVYEDDLDKADEIIYTGQGGNDLLGNHRQIGSQQLKRGNLALKNSRENGNPVRVVRGHLSKNSYTGKIYTYDGLYKVVDDWVQKGVQGHVVFKFKLKRLEGQPSLTTSEVRFTRAEAPTTISELPGLVCDDISGGQENIPIPATNLVDDPPVPPSGFKYLKSLQIPKDIKIPSSIIGCDCEGGCASNKKCLCAQRNGSDLPYVSYKNIGRLVEPKAVVFECGANCSCNHDCVNRTSQQGLQYRLEVFKTASKGWGVRTWDTILPGAPICEYTGVLRRTEDLDGSQNNYCFDIDCLQTMKGLDGREKRAGSEMHLPNLHPENDSDAQPAPEYCIDAHSIGNFARFINHSCQPNLFVQCVLSSHNDVKLAKVMLFAADTILPLQELSYDYGYRLDSVVGPDGKIVKLACHCGAPDCRKRLY

SEQ ID NO: 68671 - protein, 386 aa, Zea Mays
MRRALSRRRGPPLSGGSSGEDARAAPVQGGRRRAAREGRGRVRRGHVDQADEALRDANWLPSEDDKKERTGVSIGGGIGSISDILDASQMIIENRLRRLSPYFIPKILINMASGHVSMRYGFQGPNHAAVTACATGAHSIGDATRMIQFGDADVMVAGGTESNIDALSIAGFSRLRALSTKYNSSPLLASRPFDCGRDGFVIGEGCGVMVLEALDHAKERGAKIYAEVRGYGMSGDAHHITQPQSGGRGAILAMKRALDQSGLHVNEIGYVNAHATSTPLGDAVEANAIKSVFGDHAASGDLAISSTKGAIGHLLGAAGSVEAIFTVLAIHHGLAPPTLNLERPDPLFEGAFTPLAAPKKMSIRAAISNSFGFGGTNTSLLFSCPP

SEQ ID NO: 68672 - protein, 180 aa, Zea Mays
MAIYDFIFLWDEDLGVENFNPRRYLDIMVSEGLEITQPALDPDLSTDIHHRITIRNKMAKVHRRIYDNRPSMNCSDESKGPPCTGWVEGMAPVFSRTAWKCVWHLIQNDLIHGWGLDMKLGYCAQGDRTEKVGVIDSEYVVHQGIPSLGGPSLSSKVLDISATNYFFRNLESGRTKDEVY

SEQ ID NO: 68673 - protein, 353 aa, Zea Mays
MLGHSSKLSSTTTSMDKSALSTSQADSSSGVPGITVDKSVEFSYEELFNATEGFSMSNKIGQGGFGAVYYAELRGEKAAIKKMDMQASHEFLAELKVLTHVHHLNLVRLIGFCTESSLFLVYEFIENGNLSQHLRGTGYEPLSWAARVQIALDSARGLEYIHEHTVPVYIHRDIKSANILIDKNYRAKVADFGLTKLTEVGNTSLPTRGIVGTFGYMPPEYARYGDVSPKVDVYAFGVVLYELISAKDAIVRSTESSSDSKGLVYLFEEALNTPDPKEGLQRLIDPALGEDYPIDSILKMTVLARACTQEDPKARPTMRSIVVALMTLSSTSEFWDMNAIQENQGVVNLMSGR

SEQ ID NO: 68674 - protein, 150 aa, Zea Mays
MNVPVSSWAHSSIPQAVASSMVKDLGAGTPGSNNFCSSSTEGLPRTWQPGETNDPINQIPSLRLMPDFAGVYSFLGSVFDPSTSGHLQKLKEMNPIDVETALLLMRNLSINLTSPDFEDQRKLLSLYSASDGPGLGSSRSSALATSAPFM

SEQ ID NO: 68675 - protein, 777 aa, Zea Mays
MVLVKKLLILPSVEVYRKLEVSHLMRETLSFWVKAFSEDTAKRLENFGFIQSRPGGEYHANNPEMSKLLHKAIREKRDNAYTVYQQHLASRPVNVLRDLLELKSDRAPIPIGKVESATSIVERFCTGGMSLGAISRETHEAIAIAMNRIGGKSNSGEGGEDPIRWNPLTDVVDGYSPTLPHLKGLQNGDTATSAIKQVASGRFGVTPTFLVNADQIEIKIAQGAKPGEGGQLPGKKVSAYIARLRNSKPGVPLISPPPHHDIYSIEDLAQLIYDLHQINPKAKVSVKLVSEAGIGTVASGVSKANADIIQISGHDGGTGASPISSIKHAGGPWELGLTETNQTLIQNGLRERVVLRVDGGFRSGQDVLIAAAMGADEYGFGSVAMIATGCVMARICHTNNCPVGVASQREELRARFPGVPGDLVNYFLFVAEEVRAALAQLGYEKLDDIIGRTDLLKPKHISLVKTQHIDLGYLLSNAGLPEWSSSQIRSQDVHTNGPVLDETILADPEIADAIENEKEVSKAFQIYNVDRAVCGRVAGVIAKKYGDTGFAGQLNITFNGSAGQSFGCFLTPGMNIRLVGEANDYVGKGMAGGELVVVPVDKTGFVPEDATIVGNTCLYGATGGQVFVRGKAGERFAVRNSLCQAVVEGTGDHCCEYMTGGCVVVLGKAGRNVAAGMTGGLAYILDEDDTLVPKVNKEIVKMQRVNAPAGQMQLKGLIEAYVDKTGSEKGIAILREWEAYLPLFWQLVPPSEEDSPEACAEFERVLAKQATTQLSAK

SEQ ID NO: 68676 - protein, 226 aa, Zea Mays
MGTLIRPGPAASPLPIASPSSSSAHVAVVGGGARSLRHRVSVSVAVFRSPSTQVLATRWRRRRGMVVRSDVVAGGAAAAAAGDSTRALPGQQLASRVRGVCFYLVTAVAAIFLFVAMVVVHPLVLLFDRYRRRAQHYIAKIWATVTISMFYNLEVEGMENLPPNSCPGVYVANHQSFLDIYTLLTLGRCFKFISKTSIFMFPIIGWAMYLLGVIPLRRMDSRSQLV

SEQ ID NO: 68677 - protein, 910 aa, Zea Mays
MTAIHSAHQHGLHIQNLDHKLNIDNQFEALKCYEMIDRDCRWINATFQSVPTSMGTNMKVDDLVQIESKRASGLVVKGFQVAPPNWVRSSSGLCPVRHPSAGRCRVDGDDPATDGSDQLTQANPLSPGDVLISKDGAFALGFFSAGNYNKSLYVGIWYNKVPEHTVVWVANRDSPVIAPSRAKLAITGKPELVLSDSQGRIRWTTTNSAAAGGADAFAVLLNSGNFVLQTPTGETIWQSFDYPTDTLLLTMRLLLNHKGQVPTRIISWKSPDDPSTGNFSYGIGPNWNLQFFTWYGTLPYSRSNALNDASMSSGMYLSSGASIVYQAIVDTGNRLYYIYTVSEGSPYTRIWLDYTGKMRTQSWNSNTSSWMLVFERPHSSCDLYAQCGPFGFCDSTGDVPTCRCPEGFEPIDGVNYSRGCRRKEALRCGKEDSFVTLPAMKVPDKFLYLRNRSFDQCAAECSRNCSCVAYAYDTLSLGDSNGDTSRCLVWTGDLIDMEKASFHGNLYLRIAGSPVKKKKKSHLTKILLPIIAFVLPLTFTALVWTCKRRGRRQKKKVQKRVMLEYLRSPDEMGDKNIEFPFISFEDIAAATDHFSDSNMLGKGGFGKVYKGVLGGTKEVAVKRLSKGSVQGMEEFKNEAVLIAKLQHKNLVKLIGCCIYEDERLLVYEYLPNKSLDYFLFDSSKKSVLQWTTRFKIIQGVARGIMYLHQDSRLTIIHRDLKTSNILLDKEMSPKISDFGMARIFFGKQLQANTNRVVGTYGYMAPEYAMEGSFSVKSDTYSFGVILLEIVSGLKISSPHLLMDFPNLIAYAWNLWKDGKSEQMVDSFVVESNCPLDEVSRCVQIGLLCVQDDPGSRPVMAVVVFMLENRTTPLPTPKQPSYFAQRGYKPRKAGDHREVSTDMSLTALEAR

SEQ ID NO: 68678 - protein, 139 aa, Zea Mays
MRSSSLSQTSIGMSDPATHQQMQMWSSIPHLSSVAMAARPASAASPLHGQEGYSADAGQAGYAPQPQPRELQLFPGSSASSSPERERSSRLGSGQATPPSLTDSLPGQLCLSLLQPSQEASGGGGGGVMSRSREERRDG

SEQ ID NO: 68679 - protein, 99 aa, Zea Mays
MVYVRDSFHIFFFFAVGRTSIRMIGCRGVSRHYRASLGRWKQEKVTFPHMQATHKKTPTLYAWEQTIEMLCNYQNTRQIWSAERHGYERSQPINKSSSI

SEQ ID NO: 68680 - protein, 441 aa, Zea Mays
MAREIALLRRLGDHPNVVRLDGLVTSRLNTAPSLYLVFEYMEHDLTGLTACAAASARRLSLPQVKCYMKQLLSGIEHCHNNGVLHRDIKTSNLLVSSDGILKIADFGLATSYDPEDARPMTSQVITLWYRPPELLLGSTHYGVGVDLWSVGCVLAELLLGEPVFPGRTEVEQLHKVFKLCGTPSEDYWEKMKLAHPTFGPYERCLAEKFKDVAPSTLSLLETLLSIDPDMRGTATDALNSEFFRTEPYACEPSSLPRYPPCKERDVKLKYEKHKRKSRVNGSVERHRNRQHASQNPGRRVFTPDANNKPQANPKVPRLVTSTSTTKLERFPPPHLDASIGYSLDASVDDGATEEFFSSSAAELKKMPSLIFGHVKSYLASSPRKGVHKAKPSLNMAMAPPTLLIGAFRPYSFGRSMEVRRKNREQFRSKGRNAVGLAYRMR

SEQ ID NO: 68681 - protein, 134 aa, Zea Mays
MQVLSSTNLAADFSRALPPGAPIPMLRREVLHSFLRRRGRARPGPHHLRREVLHSFVFKLSPQGCASARCGEPADQGNRPWPPQALHLHWLLLVTSKNNQSFFARSKEVYIIAKNHLHPWGSGKAAAPRLGNLL

SEQ ID NO: 68682 - protein, 317 aa, Zea Mays
MYGVVVAALGMLSTIATDLAIDAYGPISDNAGSLSLSTATTIGGAPNTVAPCAPAWCGDLAISYPFWLAGTHLPKCGYDQGFKVTCDKAKDDGTCNIDKFVNASFVPSPPFEIEPQQNQELFFVYDCNLRAPQLPRSWTPLRCGNNGSFTWLSGEYRPEDSSMAMPGNCNVAMIPVVAYEGATAADYQWFVEGGFFLSYYLTDTEDDDYYDQCQACSYRAGHGQCRTIVSDNGFQCYCSDGVYSTTACGTKRANWKTTIVERYGNKCGKHDLSNSKTIFVVESKRELNQECSIYIGLSCMEAITESRILYLYRSQPF

SEQ ID NO: 68683 - protein, 426 aa, Zea Mays
MQQLLLKEQQAAERCVTSLLQTQRKSKSSGVTETGPDPARRRRRTEVWRGGRARRKDGERRRPKSRRDGSGRAEGVGTGDYSLHRVGRRGSSHSRIERLRRTAVAETPPEMSAPSAPPRTVICVGDVHGYITKLESLWSNLQAALPADAFATALVIFLGDYNDRGPHTRRVLDFLLALPTRYPAQRHVFLCGNHDLAFAAFVGALPPPPDGSPFSATWDEYIHNEEHEGWFRGPGFEGMHVQGRRWGGVIKERWNPKKGLPYKGSIYDAQPTFESYGVAHGSSDLAKAVPEEHKRFLHDLVWIHEEENVPVDMDGGQIICNLIAVHAGLERTIDLNEQLRVLRTRDTRVPKVQMLSGRQDVWDTPKGLAGKQTIIVSGHHGKLHIDGLRFIIDEGGGYEDKPIAAIVFPSKTLIRSTEEAGTTSER

SEQ ID NO: 68684 - protein, 438 aa, Zea Mays
MKIFERSMDGFTGGQGQGKRPGHRRQHPCRVSCRARSRVTPAKKQMMMMMMCHAAGQQETEHHGNPRTSQRPPSSLLYVCAPSLPPSLCHLPIWAAAMTLPCAGGCEIQASGINYRIAVSTRPLKVWSRSDDDVHSQDHHSVVRQVLRDVSCRARPGELLAIVGPSGAGKSTLLEILAGRLSPSPPPHLLRIDGAAAHSADLRRVSAYVTQQDVLFPLLTVRETLLFSARLRLGARLPSKDMHARVEALLDDLTLRRVAATRIKDLSGGERRRVSIGVEAVRDPPVLILDEPTSGLDSASALHIVGALRAMAEARGRTVLLSIHQPGARIVKMFDSVLLLAAGSVLHHGTVDQLRALLGDAGLHLPPHVDDVEFAIDSVDALRRHASSSLQAPSSGDREGRCTLQRLFQLHGKQVADAPVAVTMMASRYANSRAREVA

SEQ ID NO: 68685 - protein, 90 aa, Zea Mays
MHYASMCPYTPCIDRPPSLWPWRHLACDGERPPCGGEQPGRRARTRRIRIASMLLHCTPACMPGWRLVVVLGSGADGPRRRPAAVASAGR

SEQ ID NO: 68686 - protein, 269 aa, Zea Mays
MALLSPRVPRLPPSTFTSAAGARCFGPAARCQATAAGGVAAAGPPSSELEAIRWGSAKLQGARDEMEDEVLLRPGSLLDGFSFAAVLDGHAGFSAVQFLRDELYKECAAALDGGAVLSTKNLDAITASIQRAFAAVDAKLSTWLEQTDKDDSGATATVMFLRSDVLVVSHIGDSCLVISRGGRSEALTGSHRPYGNNKTSLEEVKRIRAAGGWIVDGRICGDISVSRAFGDIRFKTQKNEMLVKGVKQGRWTDKFISRSFCAEYNLKMI

SEQ ID NO: 68687 - protein, 898 aa, Zea Mays
MEADEASAPPPPPWMQNKSAAAIEASSGPLSAAASRLSARSRALPSSRDFHFYNNFPAFKSPVGAAAAKADASLGVLGGASILPTRQQPFPVGGDLDDAHDWLVALNDDLLERFGASTDEFKTLRRKEETSGRRAAPQAGDGFQVVCGKKKKKVGDGGEERVGRVEAFGGFGSVRMVTKDKAAAPGVKAKVPFHIRTIPRPQDVYCIVVDNSSKPFEHILLDRSEDGTRVVHPLEKLPVEQIISRNVPDNEPVKPPALDNTPFTFVEDLKTLEVLATKLKDATEFAVDLEHNHYRSFQGLTCLMQISTRTEDFIVDTLKLRKYLGDYLREFFRDPTKKKVMHGAGRDIIWLQRDFSIYVCNLFDTGQASKVLQMDRNSLEHLLHHFCGVAANKEYQAADWRLRPLPDEMIKYAREDTHYLLYIYDLMRLRLVNGSSCENDLLLEVCKRSNEICLQLYEKEQLTDTSYLHIHGLKENELNATQLSVLSSLYRWRDGIARAEDESTGYILPNKTLLEIAKEMPVTSGKLKRMIKSRNSILERNLNHVINNIRDAIAASGAFESIVEQLKKGKLEELTLADVKNSSEDTEMIPAVDVDNIEDPSDESAVVPAVITNVGAAPCITSEASLGNMHLEDPVPKTKDSGASSGFTGLTDNKKLSNDQQQATVQVSKRPTAFGALFGKAAAGRRPDLFLGFSNVQGKTKVDKITSSVVLPFHHFSGGAKLSSAALPAKESLHSEPDSIQHSDPACQLEEVIQLDMGTDEQQPPENGNEDDGHCETEDTEMSKSPSGDPSVTEQRFRSLNEERNVKQNQKTPREFEFSVPVVPFDYAEARKNLVSSLPKAERRKDDAVARAINTDAGDKQRGSKKPPGGGENEGNFQHPRRRQAFPPSGNRNATYHQ

SEQ ID NO: 68688 - protein, 466 aa, Zea Mays
MAPAPRASSFFSVLLVLLFALSVGCASATGVFQVRRKFPRHGGRGVAEHLAALRRHDANRHGRLLGAVDLALGGVGLPTDTGLYYTRIEIGSPPKGYYVQIELTQYDPAGSGTTVGCEQEFCVANSAGGVPPTCPSTSSPCQFRITYGDGSTTTGFYVTDFVQYNQVSGNGQTTTSNASITFGCGAQLGGDLGSSNQALDGILGFGQSDSSMLSQLAAARRVRKIFAHCLDTVRGGGIFAIGNVVQPKVKTTPLVPNVTHYNVNLQGISVGGATLQLPTSTFDSGDSKGTIIDSGTTLAYLPREVYRTLLAAVFDKYQDLPLHNYQDFVCFQFSGSIDDGFPVITFSFEGDLTLNVYPDDYLFQNRNDLYCMGFLDGGVQTKDGKDMLLLGDLVLSNKLVVYDLEKEVIGWTDYNCSSSIKIEDDKTGSVYTVDAQNISAGWRFQWHNSLILLILIRTIWSCLVIA

SEQ ID NO: 68689 - protein, 259 aa, Zea Mays
MPQRSEAGTAGEGDEEQRLRAALRHLQAEAGVLERLVYKHRNQHRGAAYFQYLLKVRRDLKLLLGAGLAEVLNAVFPVLACRKPANTILVPNKQSKKKPVANHSHHQRLLGVARLLSQMSEPVMKAAIQITFLLARSFFVDLCTAVLSLLARVRVLIQQMLLDVVSIYNKVTDLTERKQAVKISISGVQAFREYYPSMNDACTVLECVWIKDKFVLHEKVKDISQETQVENQKCCGPESTVQYETIALISEDIATTNAD

SEQ ID NO: 68690 - protein, 207 aa, Zea Mays
MRAAAAATSTAAALLAPGLKLCAGGARARVSCPSRSRLPLHRIAAMASAPNPSFRPEEARSPPALELPTPPLSKFKVALCQLSVTADKNRNIAHARAAIEKAASEGAKLVLLPEIWNGPYSNDSFPEYAEDIEAGGDAAPSFSMMSEVARILQVTLVGGSIAERSGNNLYNTCCIFGSDGKLKGKHRKERSLSRNRRLLLLGRILLL

SEQ ID NO: 68691 - protein, 680 aa, Zea Mays
MHCRPCPSQLSLVFLLLLSLAPIISALPFPEPALPMACSGLRLSLPAAVLALLLLPSALASEPLNPEVQALIAIRQGLVDPHGVLRSWDQDSVDPCSWAMITCSPQNLVIGLGVPSQGLSGTLSGRIANLTHLEQVLLQNNNITGRLPPELGALPRLQTLDLSNNRFSGRVPNTLGRITTLRYLRLNNNSLSGPFPASLAKIPQLSFLDLSFNNLTGPVPLFPTRTFNVVGNPMICGSNAGAGECAAALPPVTVPFPLESTPGGSSEHSSFLPLCLSFISTASQAGQLARLAASRAQCFSALSRSAWRGVHACVAAAAAFVPLPRRGSGRGDTVLSAWGRRRSRLRPGIPVVGCMPVCSAGGAVWPEPCICCCSRLGISVWLLCVCARAGTGTGAAAAGRSKAAGARLPIGVGTSLGASSLVLFAVSCFLWRRKRRHTGGRPSSVLGIIHERGGCDLEDGGGGGVVAAAARLGNVRQFGLRELQAATDGFSAKNILGKGGFGNVYRGRLADGTTVAVKRLKDPSASGEAQFRTEVEMISLAVHRHLLRLGSRRWTGRRGSGSRWAPRAGCCTCTSSATPRSSTATSRPPTCCWTSTTRPSWATWAWPSCWTTATRTSPRRCAAPWATSRPSTSPRGSRRRRRTSSASGSCCWSSSRASARSSSARPPAPCTARRASCWTG

SEQ ID NO: 68692 - protein, 228 aa, Zea Mays
MRPAAAAATATTAALRLRAASLSPSLAASLSPSLAALLSHRRSSLILPPLRRICSLAPPHSSAAPNSQPPPQLLSPIMDAQFVLFRAQLDESSTLRDRIRAVVAEIESASRVATAALLLVHQPVPLADVLVKAKAQVEVIKGLYARLAEVLKECPGQYYRYHADWRTETHMVVSMLAFMHWLETGGLLMHAEAQEKLGLCSGEFGLDVEDYLTGLCFMSNEFDAESAQ

SEQ ID NO: 68693 - protein, 219 aa, Zea Mays
MVKVIQGRPAEMGFRMPAEWEPHEQCWMGWPERPDNWRENAGPAQEVFARTAIAISKFEPVTLCASAKQYPKVHELMEHQTNIRVVEMSMNDSWFRDMGPTFVTCKGDSGIAEQTIAGIDWQFNAWGGIYDDWSLDSDVAKKIVEIERIPRFPQKIILEGGSIHVDGEGTCITTEECLLNPNRNPNMTKLEIENELKDFLGVSKVIWIPRGLYAFDDSA

SEQ ID NO: 68694 - protein, 283 aa, Zea Mays
MEWPTRLKIALGAAKGLAYLHEDCHPKIIHRDIKASNILLDFKFEAMVADFGLAKFTTDNNTHVSTRVMGTFGYLAPEYAASGKLTEKSDVFSFGVMLLELITGRRPIDTTQTYMDDSLVDWARPLLMRALEDGEYDALVDPRLGKDFNPNEMARMIACAAACVRHSARRRPRMSQVVRALEGDVSLEDLNEGVRPGHSRFFGSYSSSDYDSGQYNEDMQKFRKTAFNNNTYTSSQYSAPTSEYGQVPSGSSSEGRQTQEMEESGAVKKGGYSGYSSGYSGAS

SEQ ID NO: 68695 - protein, 80 aa, Zea Mays
MVLFISSISLSEESPHFGVSHALHKMISNGYKSKEGKATHTRARVATPTHSQDKNEHTKAAQRSYNSEKCSNIYHSEPDA

SEQ ID NO: 68696 - protein, 339 aa, Zea Mays
MSPSADAPGPASSASAPPLAPLIAAQLNYLLSHSKLPIRVVQIWSGCRNGRPADRFRLAIPFCLDYVHWDFVYNALSPKVAPDVVFGPEDERFQPLVDYAAAGNGDKSCLARWDCRAPEGLHALVQELRELYIEYQKERVHMVDDARLAFELSTVLSKEGIEVCMVPSADRPDEAKFAVPLLESDFDFAKLVPGCPWRLPQKIHLQVIFPISRSSSYSSMPSAPRLKLISTPDLRSLLSVEDVKLPPWSNGMCLAEYLPALEDSLNGLLVDASASIGSRRRFIEALAPIFGRPLEADPIFCRRATVLSISGMFTFLVHFAIPLQFPKQQPVVTLQSSQM

SEQ ID NO: 68697 - protein, 204 aa, Zea Mays
MATLVKDRFGSTEQLKVIEEDITKFHIRSHFLPFMKEKYGATKKLAKVASNLPFNVSTEVVKLLLPMGDVFSVVVLMLQDETAVRLADASIQSPEYRSINVFVDFYSEPEYKFRVDRENFFPRPKVDGAVISFKLKNAEEYPPVSSPKSFFSMVSSGSWGHGVQKLVPNLNCFLWLREKGREWKQLFIFGYRYKAAHSWWSWSP

SEQ ID NO: 68698 - protein, 54 aa, Zea Mays
MISNYKCTFSLKGDESTGVTQKQVPNQRVQYGGTVHLFIGTGHSSYKITFMPFT

SEQ ID NO: 68699 - protein, 934 aa, Zea Mays
MLQPREADLPALFLVFIVLPVVAYFLLGRWHDAASKKARVSVLAQRAAEEAYREETMACPDIILPGSSLRTMPYFRPMPALRQEYHECATCHAPAKTRCSRCKAVRYCSGKCQIVHWRQGHKETCQKWLGSGSSSFGGSSTEATEQMPFLTNLNSPLPGGDIHLRDLNFDTLSEPSFPTTDGYNLDTDPFLADRSNMNKSNQGIHMSENGAVGVSFEKNNYNADDEIHSPENLSRNKVSNNYFGSDAISGNGDAIYPAKSNAQQPSSCAPDMRKQPKASITVYQPDIGVYLTSDMVSSCEGSYASASEPLQRSLSSGRTIGKANAVNKRPPYPSSKVVSAQKPQDRVSTSYQNDGHEKNPCNKNDQRSTPKCESSQSTSSNLQKFGASKVEVLKKPSKFLKTSLVGLINDNKRNKVLFPYEDLVKFFQYEARGISPRGLFNCGNSCYANAVLQCLMCTKPLMIYLLLRLHSKDCSSKKWCLMCELEQYASTLRESGGPLSPSRILSNLRNIGCRLGGGTQEDAHEFLRHLVMSMQAACLDGLGGEKHVEPSLQETTLIQQMFGGRLKSKVKCLRCYHESERYENIMDLTLEIHGWVESLQDALTQFTAPEDLDGDNMYKCGSCAAYVKARKQLSVHEVPNILTVVLKRFQSGKYGKINKCVTFPDMLDMVPFVTGSGDNPPLYFLYAVVVHVDTENASFSGHYISYVKDMQGTWLRIDDSEVQVVSVNQVMSEGAYMLFYMRSFPRPPRIYIEKGPTVPSAKRHTSKYSKGSKHEREQTELLLSANDPAYGVYDFRPDGEGYTQDQQAELRSRDFHRADDAFADSVSADFSEATSSEWSLFTSSDESSFTTESTRDSFSVVDYGDNAGLDPISSIFGPSYAPEHHPGPPGSFAACTRLSPSNPQTRYFSESTGFVSDYSSSGIVHRGRDPGEAY

SEQ ID NO: 68700 - protein, 77 aa, Zea Mays
MISGNGVDSLDLDQQPRRLAPTQLAAHRREREPPLRRLRRRRRRHVGPRELGPRQHPRRPRPRSSPQRQQRRQAGRG

SEQ ID NO: 68701 - protein, 245 aa, Zea Mays
MISAKSNAAVYPCPEYAEVDPTGRYGRFSDVLGKGASKIVYKAFDEYQGMEVAWNQVKLHDFLQSPEDLERLYCEIHLLKTLKHRNIMKFYTSWVDVSRRNINFITEMFTSGTLRQYRQKHRRVNMWAVKHWCRQILSGLLYLHSHNPPIIHRDLKCDNIFVNGNQGEVKIGDLGLAAILRKSHAVHCVGTPEFMAPEVYEEEYNELVDIYSFGMCVLEMVTFEYPYSECTHPVQIYKKVISLPV

SEQ ID NO: 68702 - protein, 499 aa, Zea Mays
MPWTRTEGARVCYVVVAPASGGVSCSGWGNMMKQIFGRRKASKTADKEFTGGRTFSQLSGSGVADLSGQPPILSSTGHAYGSGNRTGFQDSRINDNLFSSNFRPLPSFKDVPNTEKQNLLIKKLDVCCTLFDFTDASKNMKEKEIKTLMLLEIDEYVRTANVKFPEIVVEAITKMISVNLFRTLISPPREKKALQAFDLEEDEPLMDPAWPHLYHVYELLLTFVQSPQNDAKLAKRYIDYSFILRLLDLFDSEDARERDRLKMVLHRIYGKFMVYRPFIRKAINNIFYQFIYETEKHNGIAELLEIFGSIINGFALPLKEEHKLFLVRTLIPLHKPSTKEVLFLGELEEVLDATQPGEFQKCMVPLSHQIARCSNSPHFQVAERVLFFWNNTHFENLVKQNSKVILPIVFPALEKNINGHWNQVVRSLSLNVRKLFSDRDPQMFNECLRGYEEDKDREKEFRLKQELAWKRLDEIASAKVTSGEAVLVSPTLHRQPSVL

SEQ ID NO: 68703 - protein, 112 aa, Zea Mays
MSQVVLGTCLRRKKHRVADRGRWAGPVRVSHDVSARKTAFLRERPEEQVWEWSQLRARPERTGTHITHAGGEPRYHHRFSVAPAMTRRIAFSRLSLFSPQLVCVSSPMRRAR

SEQ ID NO: 68704 - protein, 497 aa, Zea Mays
MLQKKDPKLCSHIFHNQPQYDEHHDSSPVLVSKYHRWDCSRCLDSVEVSGHRPTSENVSMQQNGMNDGCSISIVWILPNSVDSRRLFSCTHQSSQGNDRLTLSKTAQECNSKCSSPGNKAITAMNVPVAEENVPEALVDTRVPSIEVLQASPNSIDLSANILNAVSKNVSDLPDDVEENGTQNPHSLKPCVAPNEDENNIANDDLNEPNVCKPVSGHKSKQVCNMGPRRASSKRNVESDGKRKRNKSTKLPGISDLKFCQRKPKKTRLLSELIGSEQVGVSGDAVQVDHTNSVDLCEGGKRKMHLEVGKGNDTTNQQVDKIQSRAVKNKAKYTGVDKLEDGSSLMNWLKSTNKEVRTKKKDSEHKNLDSSSISRSYPDIVASNDMHHDFLPSVGDVGQADVPSTTSAKHGNGNAQNDKLEQNMQKMDGLCENESRNLKQRFFSNEKSTILLKRKVLSTSVVHDENIENSNIKRDMLRSDDLPQKEPEVSVQRYLAKV

SEQ ID NO: 68705 - protein, 101 aa, Zea Mays
MKATCVSPCCAVTLELFTTRIAKPEDVCLPALYLSAGSVKISLCLGVLAKACSGVRDSCVLQDRAPLPLPPSWHCPELCALSSCVCDDHSHQVHHTIARTF

SEQ ID NO: 68706 - protein, 186 aa, Zea Mays
MADSSGVPFLNLATLQGILKFLCSKLQEEAEGCSLLHNQLLSIPIGTWSPHTGRSSSRQLRTLLLSSPLNTCLDILLQDRVSSIPIVDDNGSLRDVYSLSDIMALAKNDVYARIELEQVTVQNALDVQYQVHGRRQCHTCLQTSTLLEVLEGLSIPGVRRLVVIEQSTRFVEGIISLRDVFTFLLG

SEQ ID NO: 68707 - protein, 118 aa, Zea Mays
MLGPAMSELVCGGCFTMLVHSRSATNVRCPHCGRLGSTRSGNQMGHLSCGQCRTTLAYPPGATTVGCPTCRNVNPVPTRVRMDARPQQTMVLVENPKTLDEKGKLVSSVAVGVTSWKR

SEQ ID NO: 68708 - protein, 679 aa, Zea Mays
MLLPILCSSYGTRHLPLLQCFHPISFWRCCILASASSQQCIGGEANSSVNLEGTVFTFSDTRNKFTALGCNVVAMLLNGSTGYSGGCASFCSSGNSIIDGSCSGVACCQAPVPKGLKKLDLEFSNINITNSGIDYGPCGQAFIVEQNSYVFSLPDLNYTVDTKPQYRHVVLEWSVNGSSCEEAKLSGSYACAENAYCYNSSNGIGYRCNCSSGFEGNPYLQGPNGCTDINECITRNPCTNRCSNTIGGFQCTCPAGMSGDGLKEGSGCNGVSTLVIAIVAGLALLVLLLILGFWTHWLVKKRKLAKTRQRYFMQNGGLMLKQQMFSEEAPLHIFTSSELDKATSNFSDDNIVGRGGFGTVYRGILSNQVVVAIKKAQRVDQTQTEQFINEMIILSQANHKNVVQLLGCCLETEVPLLVYEFITNGALFHHLHNTSVPMSWESRLSIAVETASALAYLHLAAKMPIIHRDVKSSNILLDDNFTAKVSDFGASRPIPHNQTHVTTLVQGTLGYMDPEYFQTSQLTEKSDVYSFGVVLIELLTRKKPIMDDIAEDIRSLALQFSMLFHGNKLLEIVDPVVAEEAGVRHVETVSKLALRCLRLKGEERPRMIDVAIELEALRRLMKQHFILKNESLLQESCCNEEMSIDAPSSLFLGVDGISDDEGMEIIPLTCPSKILTSYP

SEQ ID NO: 68709 - protein, 1243 aa, Zea Mays
MGKGGPRPAEAKKSAPALRSLASVFMHADVADVVLMVLGLVGAMGDGMSTPVMLFITSRIFNDLGSGPGLLQEFSSKINENARNLVFLALGNWLMAFLEGYCWARTAERQASRMRERYLRAVLRQDVEYFDLKVGSTSEVITSVSNDSLVVQDVLSEKVPNFVMNCSMFLGSYAVGFALLWHLTLVALPSVLLLIIPGFMYGRILIGLARRIREQYTRPGAIAEQAVSSVRTVYSFVAERSTMAQFSAALQESARLGVKQGLAKGVAIGSNGITFAIWAFNVWYGSRLVMYHGYQGGTVFAVSAAIVVGGLALGSGLSNVKYFSEASSAAERVQEVILRVPKIDSESSAGDELANVAGEVEFKNVEFCYPSRPETPIFVSFNLRVPAGRTVALVGGSGSGKSTVIALLERFYDPSAGEVTLDGVDIRRLRLKWLRAQMGLVSQEPALFATSIRENILFGKEDATGEEIVAAAKAANAHNFISQLPQGYDTQVGERGVQMSGGQKQRIAIARAILKSPKILLLDEATSALDTESERVVQEALDLASVGRTTIVIAHRLSTIRNADMIAVMQYGEVKELGSHDDLIDNENGLYTSLVRLQQTRDSREANQVGGTVSTSAVGQSSSHSMSRRFSAASRSSSGRSMGDAENDNIAEKPKPPIPSFRRLLMLNAPEWKQALMGSFSAIVFGGIQPAYAYAMGSMISIYFLADHDEIKDKTRTYALIFVALAVLSFLINIGQHYNFGAMGEYLTKRVREQMLAKILTFEIGWFDRDENSSGAICSQLAKDANVVRSLVGDRMALVIQTVSAVLIACTMGLVIAWRLALVMIAVQPLIIVCFYARRVLLKSMSKKSIQAQSESSKLAAEAVSNLRTITAFSSQDRILRLFDQAQDGPRKESIRQSWFAGLGLGTSMSLMTCTWALDFWYGGKLMAERHITAKALFQTFMILVSTGRVIADAGSMTTDLAKGADAVASVFAVLDRETEIDPDNPEGYKPEKLKGEVDIKGVDFAYPSRPDVIIFKGFSLSIQPGKSTALVGQSGSGKSTIIGLIERFYDPLRGVVKIDGKDIKTYNLRALRRHIGLVSQEPTLFAGTIRENIVYGTETATEAEIENAARSANAHDFISNLKDGYDTWCGERGVQLSGGQKQRIAIARAILKNPAILLLDEATSALDSQSEKVVQEALDRVMVGRTSIVVAHRLSTIQNCDQITVLEKGIVVEKGTHASLMAKGPSGTYFGLVSLQQGGNQH

SEQ ID NO: 68710 - protein, 220 aa, Zea Mays
MLLLRCLLMDLDRQNTGKATVLGDAARVLRDLITQVESLRQEQSALVSERQYVSSEKNELQEENSSLKSQISELQTELCARMRSSSLSQTSIGMSDPATHQQMQMWSSIPHLSSVAMAARPASAASPLHGQEGYSADAGQAGYAPQPQPRELQLFPGSSASSSPERERSSRLGSGQATPPSLTDSLPGQLCLSLLQPSQEASGGGGGGVMSRSREERRDG

SEQ ID NO: 68711 - protein, 401 aa, Zea Mays
MRYYIYEKNMLMLWIMSGIKIFLQASFEMSHQQALAQVTAQAVHSQYNMINHADYTISFSSTTTPALVTAQHANFSGNLTSAQEKPALPSHTGNSNIESNEVSQGLKTSAPTFDKPADDGYNWRKYGQKAVKGGEYPRSYYKCTHTSCAVKKKVERSAEGHITQIIYRGQHNHQRPPKRRSKDGGGQLNEADDFHENEDTSTRSEPGSQDHSGKHEGSNDGIPGPSVSRRGEVYEQLSGSSDSEEERDDEQRAGNGCPGYTNANRRHVPTPAQRIIVQTNSEVDLLDDGYRWRKYGQKVVKGNPHPRSYYKCTYQGCDVKKHIERSSQDPNAIITTYEGKHSHDVPAARNSSHAAANANGSCSTSVAHRVQSSASSSRRMADLQNTSSASSMHLKEEDEIT

SEQ ID NO: 68712 - protein, 78 aa, Zea Mays
MLVGATRTTGAQLDAEYVHYVPHSLSLPVCVYFRLWSKEERGPGTRKQACCRSGRRVAACTLMESRGVTLIAGRRGTA

SEQ ID NO: 68713 - protein, 77 aa, Zea Mays
MPEPSHTGGHEQPCHELHREGREKKEERAHLGGRRGHDTAVLGEMGEGARRGSSPRHGLQWRVDDKGATGARAGRLA

SEQ ID NO: 68714 - protein, 630 aa, Zea Mays
MPCSDFVLDGTRTIYDMNNPVMEPGSLYASMEQFRLAIRQYAINKEFELGIEATNKTRFRGYCKGPDCPWSIHARSEMKGSPTIQVIVLNDEHTCTSSGRRKTTTPTGAWVAARALPLLMKKPHMGAKELQSMLQDTFGCTITYDTIWHGKEKALKQLFGSWEESFQLLWSWREAVIQKSPDSIIELDVKMDEGRPFFSRFFCALGPCITGFKEGCRPYLSVDSTALNGRWNGHLCCAIGVDGQNWMYPVAYGFFEAETTENWTWFFQQLRKAVGDLPLLALCSDACKGLKNAMNTVFPQAEKRECFRHLMQNYVKQFVGSEYMYPAARAYRREVFDHYFSNVQEIPKVSSWLYEHHDSLWYRSGFNPAIKCDYVTNNIAEVFNNWIKDWKDLPVCDLADKIRKEIMELFHRRREIGQRLQGRILPSVVHILHVRTRGLGHLTVKKADNYIAEVRDNNNVHSKHIVNAQLRQCSCNEWQHTGKPCHHALRLITTQQFRDVRMEDFVDDYYSVDKFMKAYSRVVEPIGDKSFWPTVPFAKEVCASIGKRGVGRQRKNMIKGCLEGGSGKKPNENENVKTKKMIRGKFKCPNCGELGHRKASYKCPLNGTKKRKRRARKNVTKGWFPKDVEA

SEQ ID NO: 68715 - protein, 140 aa, Zea Mays
MVAPSSAATACFVSPLPPPRRPRHFLRHLARAAVAEPTPAPASASSLAHPSPWPWAQRLCDLVPTEAVGRLLSSVVGSLIVALAFASLILGDTDAASAFVVSTPRKLQADELATVRLFQENTPSVVYITNLAVRVTLADQ

SEQ ID NO: 68716 - protein, 320 aa, Zea Mays
MRKPRLSVGGGGGLLHGFPSPVLLFLLLLLLSSWRVAAQAQQAPQTDPVEAAAVNAILSKLRLSAPPSWNISGNPCSGAATDDTSIDDNPAFNPAIKCDCSDQNNTLCHVTRLKINTLDAVGPIPEELRNLTHLVKLTVGINALSGPVPKELGNLTNLLSLALGSNNFNGTLPDELGKLTKLRQMWASDNNFSGQIPDYLGSLTNLTQLRLQGNSFQGPIPTSLSNLVNLKKLDLSFNNITGQIPQSILNLTSLSYLDFSYNHISGNFPSWATDKNLQLKTYCLVIAHKTCRFNITVIANFPYMFYFDTKEFGSKRLCDG

SEQ ID NO: 68717 - protein, 851 aa, Zea Mays
MQRILSRAARRCTNSSAAFNSPHAQANAASVHSEDAPTCSNKNDDFTWKTSFVRPMQSEVVNALRRGDRQRASLILSNFHHTKESLTKEDFSYILEYCAEAPDPLFVMETLELMEEKAIGMSKSIYRYVIRALSRGGYAKEALHWLALLGEKESTHATTPIFNIFLNACGRANLKDAENCLEILENLFLGKSEITYCELLKLAVLQGNLPAAYDIWKECSRYYSPSIVTQRRFIRALTALGDLQSAYHILQHMVALAAQSCDYLRVSSKRRYRSSRLDIPVPALNEFEDLNLPSCQGKLATGEHLVDAQPELFDEKTRPGNNLSYKVVVDASVANTLKSAPSTVKQILRWAFNDVLHACVPFNNCQLAEHLFTEMQKLGLQPTSYTYDGFIKTVIAGKGIAYANKVINAMERRGIEPYSDTLAALSEGHSNSLQLDLAEEFLERISEIKPKHIGSFNALLSGCAIMNEPERAVRILAKMKHVNMKPTLRTYELLFSLFGNVNVPYEQGDVLSHVDVSKRISIIEMDMFNNGIQHSFVSMKNLIRAFGAEGMIEEMLRYLNIAENTLWNINPHQKSDLYSTALHALVDVKETHRAVKMFKIMRSCSLPTNISIYNTMIECCKWLPCFKSASALLSLMLRDGFNPTVVTFTSLLKVVLENDNFEGALDLLDICKIEGLQPGIQTFNTVLLRAYARGQIHVLEYILECIHRSKIQPDPSTLWYTFCAYEEHELYNTAIESLLVLSMRMISEDAGIPSEKRIVFEDLILSEEPDAEFRIIRAFQAGEEFLATALLNLRWCATMGATVSWSPEESLWAMRLAASYDANKRPHINPSDAPKSWGRNPLNRPYWEANG

SEQ ID NO: 68718 - protein, 306 aa, Zea Mays
MAARVPAADLNQHLSSPFIARRCHGPGEAALEAPLSVRIKSRTPRRRAESTTTRILCRGAEAQPGSGGGRRREPLRRGAVSARLPVPDHIRRPPYVGTAAVPEVCPDRQVHDGESIMRMLDACELAARVLHHAGAMVKPSVTTDEIDRAVHQMIVDAGAYPSPLGYGGFPKSVCTSVNECTCHGIPDSRELQDGDIINIDVTVYLNGYHGDTSRTYLCGEVDDATKQLVKVTEECMMRGISACRHGASFKEIGQRISEHAEKYGYGIDPFVGHGVGRMFHCEPIIWHTSSWTAAITSPSRPAAAPG

SEQ ID NO: 68719 - protein, 107 aa, Zea Mays
MFTLWVAASQHCWTQDQPTVSSITKWARSCNCHCSNALDCALHSSNSVFCNLHIDIGGEAFTVDCFALDLGGYDMILGVQWLGTLGPILLDFHHQTLYFWREGCQVI

SEQ ID NO: 68720 - protein, 139 aa, Zea Mays
MCISYTGARGSHLANKKTKYWVQQKSKGTTEGTSGLAHRTVRCITGQCPVHQRTPIQTRHLRENPEALRYNSPDCPVYTGQCPVLQGRAALELASFGNSQRLVHYNSPDMSGVHRTIRCDIEATDTSAPTATCSALNAR

SEQ ID NO: 68721 - protein, 1064 aa, Zea Mays
MGRKKSRPVRAAGAAFAAAEADPCAPSPSGSTKRRTKGEARRDVCVEVDRSTWGHADIEHRDVAEVVLRDVSVYGDGDGEGALEEAFGASTFSLRLRVRDAPEEGFRMGQWPVVESDCVLLEYVVHGGREGKHAEYVVSGCFDGPDEGVSGLVHLVSLRFITLRVQSFRAFQHMGEVRVESFRVRVEVMEQAFSACGSLLEVARHPWRKSLMNVIAWLRPEVTTSAAIYGLDNLGVPMDDGGNADLVPKSDSQFDLAAFYEAIKPSANAGQLERDLPDLIPQLRPYQLRAAHWMVQRENGNTLHQEYANSAPYCVPFDFVHKNSRMFYNPFNGNISSQPEPSPPYISGGILADEMGLGKTVELLACIFAHRRPISLDFSVFQNKTEMDQIKRQKVERVECICGAASESSAYTGLWVQCDICDAWQHADCVGYSPKRNILFADTTEDVVSTNKKSTMKSGFRRKKKPRCSIVETEDKYICALCLELIEATQTNILSHATLIVCPAPILAQWHSEITRHTRPGSLKVCIYEGARNLDPSTIQKNDMTEIITADVVLTTYDVLKEDLSHDFDRHDGDRRFLRFQKRYPVIPTVLTRIHWWRLCLDEAQMVESGRTSVTEMALRLNAQHRWCITGTPIQRKLDDLFGLLRFLRTNPFDTYRWWVDIIRDPYERGNKVAMNYAHNFFREIMWRSSKIHVSAELQLPPQEECFSWLIFSSIEEYFYKKQHATCMDHAHQIIRSLRNDTNRRESISDSNALLNVYLSNDDIAKLLVPLLKLRQACCHPQVGSSGLCSLQHNPLSMDEILQVLIGKAKIEGEEELRKIVVALNGLAGLAVIEQRNQEAISLYKEALALAHENINDFRVDPLLNLHINYNLAELLRISSEYLQECPLKNPAFEVAISRKRKEIDTVETNVLSVKRNKICENSVLSLTANGLEISEDKNTIGQTCMTRDVDVENVTGCHSSFECFADDCLRKTCNTITEKYLSTFTSRLVVAQKDFNASFTEVLNITKELQSEYMNWWLYALDCIEENNISADDLIKKIDNSSSKSTTGLGSWGISSRSAANLF

SEQ ID NO: 68722 - protein, 150 aa, Zea Mays
MACIRHCLHKGRRSVVEDHLIVSHGRLACSSLAQYVASGFSRLCDHQNIMGSKVGLLRNARRWCMHDEAVVHYIDMIDQTTLGHRMIKKQFNKTPRAGWQIDPFGHSAVQAYLLGAEVTTINIIFGMKPFFYQNQYDKLLHFSKQKIQFS

SEQ ID NO: 68723 - protein, 555 aa, Zea Mays
MVLMPWNQFKPQGSYQTLLGSQISYWMILKIKRMMVLDLMSSLLILKLPKPPLGTLMQFVIQLIKPFTRDKKSVDIRGRSEGSPKRRKTRKKDGLVNSPETLTASDKECSETGGSTEAPMENSALKDALGGRHIGKLYVSNKEIGRGSNGTVVFEGSYDGRQVAVKRLLRSHNDIAEKETQNLIISDHDPNIVRLYGCDYDSDFVYISLERCHCSLADLIQKHSYLSSGESVSNNEASFSIKSKISNVKGMDVELWTHDGLPSAQLLKLMRDVVAGLVHLHDLGIIHRDLKPQNVLISAGGPIRAKLSDMGISKHLQDDMTSVSHHGTGFGSSGWRAPEQLRHGRQTRAMDLFSLGCLIFYCITKGKHPFGEYYERDVNIANNRFDLFMVDYIPEAVHLISHLLQPNPEARPTAVYVMHHPLFWSPELRLSFLRDTSDRIEKTSETDLINTLESIGSLAFGGKWGEKLDAALVTDMGRYRKYNFGSIRDLLRYIRNKSGHYRELSDDLKGILGSLPEGFDRYFASRFPKLLIEVYKVLWVHCKDEEAFSKYFKGS

SEQ ID NO: 68724 - protein, 192 aa, Zea Mays
MGGMGGGAERGMRGSRFGMFGDDIFGSHPQFPGEASMHVPQRSQKVPPIENRLPCNLADLYKGTTKKMKISREVLDASGRTLVVEEILTIDIKPGWKKGTKITFPEKGNEAPHIIPADIVFIIDEKPHDVFTRDVQINNIIYPGYEEVVPREGMPIQKDSSKKGNLRIKFSIKFPSRLTSEQKAEIKRLLGS

SEQ ID NO: 68725 - protein, 95 aa, Zea Mays
MRRRRSPEVVQERFINEHQRRTSPKAVLQSFINKHRRRTSPKAVLESFINKHQRRTSPKAVQESFVSISKLVATRQGMMLNQKFLQHQKLNHQRM

SEQ ID NO: 68726 - protein, 165 aa, Zea Mays
MASVGRAGRGGKGDGGKGEGSLARRAWRQYLLQLQQHPLRTKMITAGCLAGVSDSVAQKLSGFQKIEKRRLLLKMLFGFAYGGPFGHFLHKILDYIFQGKKDTKTIAKKVLLEQVTSSPWNNILFLFYYGYVVERRPLKEVTTRVKKQYPSVQLSAWMLHSDIGP

SEQ ID NO: 68727 - protein, 146 aa, Zea Mays
MHDGVASANLSVYGSIGRSRRSGQQSWQIQTTCAPYRLPPSHPHDARDRPSHRFVLPLPLLHVHPPLMLCRLSCRYIQLILLCRPRGAGDIVRAGPSAGARPLQPLPGAVRRHHQPPPRHAGQPQGEDLRQGHGAADHHDGHLREL

SEQ ID NO: 68728 - protein, 229 aa, Zea Mays
MAFETRLCVSALSALTLVVQFNGWLSFFLLLYYKLPLRPETHKTYYEYTGLWHIYGLLAMNSWFWSAIYHSCDTIWTEKLYFSSAAAFLGYSLILAILRTSSLRDEASRVMVAAPILAFVTTHILYLNFYELDKGLNMKVCTVISIAQCLLWALWAVMSGHRSRLKIISVAVGGAVAVLVEAYDIPPRWGYADGRAICLAVAIPLSYLWWSFAKEDAEMRTSAILKKTR

SEQ ID NO: 68729 - protein, 1038 aa, Zea Mays
MNLYMLKQTSLLLPLLLCCVCNTVRCSAAPDTNTSAETDALALLEFKRAASDPGGALSSWNASTSLCQWKGVTCADDPKNNGAGRVTELRLADRGLSGAIAGSVGNLTALRVLDLSNNRFSGRIPAVDSIRGLQVLDLSTNSLEGSVPDALTNCSSLERLWLYSNALTGSIPRNIGYLSNLVNFDLSGNNLTGTIPPSIGNASRLDVLYLGGNQLTGSIPDGVGELSAMSVLELNNNLLSGSIPSTLFNLSSLQTLDLGSNMLVDTLPSDMGDWLVSLQSLFLNGNQLQGQIPSSIGRASELQSIHISANRFSGPIPASLGNLSKLSTLNLEENALETRGDDQSWGFLAALGNCALLNSLSLDNNNLQGELPDSIGNLAPGLQVLRMGFNNMSGTVPPGIGKLRNLTTLGLSHNRFTGVLGGWLGNLENLQYVDLESNGFTGPIPPSAGNLTQLLALKLANNGFQGSVPASFGNLQQLAYLDLSYNNLRGSVPGEALTSPRMRTCVLSYNSLEGSIPLDFSRLQELTELSLSSNAFTGDIPDSIGQCQMLQTVEMDRNLLTGNVPVSFGNLKSLSTLNLSHNNLSGPIPSAALTGLQYLTRLDISYNDFTGEVPRDGVFANATAVSLQGNRGLCGGATTLHMPSCRTRSNKRAETQYYLIEVLIPVFGFMSLALLIYFLLIEKTTRRRRRQHLPFPSFGKQFPKVTYQDLAQATKDFSESNLVGRGSYGSVYRCRLKEHGMEEEMAVKVFDLEMPGAERSFLAECEALRSIQHRNLLPIRTACSAVDNRGGMFKALLYEFMPNGSLDTWLHPRAAPPAGGGKAPKRLGFSQRVNVIVNVADVLDYLHHECGRPTVHCDLKPSNILLDDDLNALLGDFGIARFYADSKSAPPPAVDDPTSSVGVRGTIGYIAPEYAGGVRLASTSGDVYSFGVVVLEMVTGKRPTDPTFKDGLDIVNFVSSNFPHQISRVVDPRLSEECKEFSRDKVEPENAAYQCLLCLLQVALSCTHPSPSERVSIKEVANKLHATQMAYEGAKEKK

SEQ ID NO: 68730 - protein, 220 aa, Zea Mays
MQEVKPGIYVTYNDDFFDWPFLEKRAAHHGIKMNEEIGFQCDNNQGECRAKFSCHLDCFAWVKRDSYLPQGSQGLKAVTKAKLRYDPLEVNPEDMVRFAMEQPQTMASYSVSDDVATYYLYMTYVHPFIFSLATIIPMLPDEVLWKGSGTLCEILLMVQLALLTKSASSSACPIVIQILIWDVEVQPNRHAVLGASESRPDLIYGFNEMLVLAHLLSDDR

SEQ ID NO: 68731 - protein, 812 aa, Zea Mays
MPPFRMPSHFLALPLLLLLLLQAPSPEAAESTPGTRTRKIGSSGASSVFSLFNLKDKSKFWTESIIRKEFDDLEGSASRDSSKNGLLNFTRAGNIANYLSLAEVDSIYLPIPVNFIFIGFDGNGRHEFKLGPEELERWFTKIDHIFEHTRIPPVGEVLTPFYKTTVKKLQHYDLPLVSHVNHNFSVHAIHMGEDVLSVFEHAIKVLSCKDDLVDSRENEEIFLQVDSAQMEHIFSTLVDHLQIQEAYNIFVLNPKPIGKRINYGYRKGFSESEINLLRENKTLQARILQSKSDNKLFLDIEKGVNRRPLYESHPLSSFSWTRTDSMDMGDWSKKCKEALSKFELLKEGKSKEDIVYEKAVQILHGTKDEVHDIVQSALKSSDLKGLHAQCLTDIWIGRERFAFVDLSAGPFAWGPSVGGDGVRTELSLPNVAKTVGAVAEVTEEEAEEKLQDTIRERFSSFGEDYHAVDILLAEIDVYELFAFKHCVGRRIQLALCKELDERMHDLKKELEGYNTGDFDETNKKKALDALKRMESWNLFRDTSVEHHSYTVAHDSFLAQLGSMLWGSMRHVIAPSASHRVYHYYEKLSFQLYFVTREKVRSIKQLPVNVKSIRESLNSVLLHHQNSMFSQNMLSLSEDPSLMMAFSMARRAAAVPLLLVNGTYKSTVSTYLDSAILQHQLQKLNEHNSLKGRHSNHRSTLEVPIFWFIHNEPILLDKHYQAKALSNMVVVVQSDDDSWESHLQCNGRPILWDLRKPVKAAIAATAEYVSGLLPPHLVYSHAHETAIEVCYLFIYICFIICKQRLSAVKYLNS

SEQ ID NO: 68732 - protein, 583 aa, Zea Mays
MASTEGFRLVRCPKCLNILPEPPNVTVYKCGGCGTTLRAKTRASGGQQVAATAKQGRQDSDSYSVATAVSSGVPRQNRDQGSIGAVTESSFDADVASAEHGSNGARSGENGGGMLAGQNVHFEGQDNNTSSRMEGPAGQTRLNANATYLDSGGTENHTVQQTAEKCRVSGHVDDTECHLNTSEDEMFPSETSKAAVGMQDPGQKKEAGGTEHAANKKSHLVRALSRSCDLGSSMNLTDFHSARASLQSKSFRASAPLQSKIMSTVDELKGDLSEMFSKPADCKPRPHPHPPRPSKRDGGRTARAAVTSSAPLAAYRPPAEHSGYVSRSRLSRSCEQEPSAMHRAPVEQVKRRPPPRNHCLPVLSGAPFVICSSCVSLVQLPADFAVPSRGARRLRCGACSELLSYSYRDPAGRKKPRSPFEGDECSTDGYDEIRHQAAGAGFERAGPAVSYSEEYGLSFGIGHSTSSSTEDGQPLYVSRNSSFNTADDGRMGRDGKLHRLMGYSSASELLRHSPDLFESFDRRAPSARAHVDGKGKGVCVAGNDAAGARDGAAKRSKARSGGLPLHGILKKGIHGLESLKLRS

SEQ ID NO: 68733 - protein, 154 aa, Zea Mays
MARPEATGGGGGAVVVGLRARARVRGVFAGGGSGGGVGRRVGGSPAAVGQQRRGWRGWQRRTGGAGGRTAWSAAARRGSEAGLEDGLESSGLERPREQRPGGRTAWRAAAWSGGGLEQRHAEAGLAAPDGRRRRVGAAAAAAWRLERALECGGW

SEQ ID NO: 68734 - protein, 55 aa, Zea Mays
MECAGVLWRDPRQGRLFRRLHRRRACARGGVVDLVFFLLSLEGCNPMGAGERELG

SEQ ID NO: 68735 - protein, 50 aa, Zea Mays
MESSVFECQAMELSIFECQAMAAQTMESQAMMAQVLVFRPWSRNQAFKML

SEQ ID NO: 68736 - protein, 497 aa, Zea Mays
MRKFGKEALSQCYLDILVHVLRQRTPVHHLRPQQDGLKQKQRRLPTQSGGNMVPAFQASLRRAQFTLLPEIPPLAMPRRWGPNSHSASLPFLGKPIPRFGAHHKADLRKREEDERDRTKLRAAPTDQTLGVRRASPRRRRKGASRRLGVPEVVDGAARSASSSMSRRVPCKFFLHGACFKGDYCEFSHDCNDQPDNVCTFYQKGTCTFGSRCRNEHVEVHCNCPQPATTVARASSNSSQLVASSRDPHCSECQTDLCDQTQQICKSTAALSAHQPAWVVDYHDHDTPDDTTSWPLHQAVQNQTSQYPVHLPICSSTADGTCPYGKGCSQMHGDLCAFCERQCMNPYQSDERGVHVKLCKKNNRVLEAMRRSEDIECGVCLDRVLSKPTAAERRFGLLSDCDHSFCISCIRNWRSTSPTSGMDVNSTLRACPICRKLSYYVVPSITWYSSKEEKQEIVEGYKAKLRSIDCKHFDFGKGTCPFGSSCFYKVHSTVFGVI

SEQ ID NO: 68737 - protein, 180 aa, Zea Mays
MIDMLRECGLAHKTILFILEEFDLFAQGKQRLLYSLLDAMQSLTSQAVVIGVSCRLDADQLLEKRVRSRFSHRKLLFISPSLDDIQRLVEHLLILAKDSGLPSKYIADYNSRLTSIFSDKKFKGCLNSLMDADATTSNIQRFLFRAVSYMDMESGFLSVESFLKALSSMQRQPKMDSLQD

SEQ ID NO: 68738 - protein, 141 aa, Zea Mays
MSRRNVVAIDPIQVYYVEGILEQLAFVEESKRKEDWVVRNQERRAAKRNRIRDEHKYQEDEPEAQEWADELSPDELERLLNHDHGWLIANPHQFKVPSWFLNRKKYYKDGRFSQEPLWSVTTGVYLSVASTPRLPKGMERL

SEQ ID NO: 68739 - protein, 73 aa, Zea Mays
MDPCALDALSHTAPRPNRRINRRPTACVSLMLLLQDGWYIALCCSTADNLQHINHGRLMPQPVLSSMLPMLCP

SEQ ID NO: 68740 - protein, 988 aa, Zea Mays
MSLPKEFHEQCEYSLEVQFLKDFYCWAQAAVFNTADKILNSTVTIPDERACSAALRLMFQILSWNFKHTVEHESSDAKINFGLRIDTINLKKFERSLVKPGSMWREILISSGHPTWVLNFYTTLRQKYSYDTLWGDSPIAVSCRQLIVQLCSLAGSVFPNDNGDAQIKHLMLILSAVVLWIEPPDVITASIRNGGSESEFIDGCHALLSIASLTTGSLFDNLLKSIRPYGTVNLLSALTSEAVKSVLNNQSEEETWGIDSLDILLETWNVLLGDVDADKNPISTDGALASSSLFKMIVESHLKAAADSAFEDTDDTEYFHVSVSKRDEQLALYALIARASANTTIPFLAQLFSERFARLNQRNGESDPTQTLEELYWLLLVTSHVLTDSGEGETLLIPEALQAGFPNVIEAAHHPVVTLSWSIINFSRQCLDPGIRAKYFSPRLMEAVIWFLARWVATYLVPLDVSRGKVSREIDNVGTNGSQHSRKLLNSFAWENNQGELVLDFVVLISMLALTTYQGENELQTLTCQKLLATVVRRKHTCTYLVQLDSWRDLTRAFASGRSLLSLSGRLQRSLAETLASAASCIKDPEASAQYLRDLMGPVAGCLVENASRSDLKSVAQQADVIYMVCCLLERLRGAARATQPRTQKVLFEMAHTVMNPLLTLLEVYKNHSTVVYMILKFVVDFVDGQAVFLDAKETSALVSFCLQLLQIYSSHNIGKVMLSLSSSLRNESQAEKYKDLRALLRLLTNICSKDLVGFLSDCGGEGSPDIAEVIYIGLDIVTPLISLDLLKYPKLSRDYFVLISHLLELYPEKVAHLNSDAFTRIIGSLDFGLRNQDSDVVERCLAAVNALASYNFKERLGGRGRLNSQLMESEGSNGKLQESISSHFLRLLLQILLFEDFRSELAGYAADALLPLLFCEQELYQRLVHELLDKQQNPTVKSRLATAFHNLTSSNNLSSSLDRPNRQRFRKNLLSFMADVSGFMQIK

SEQ ID NO: 68741 - protein, 950 aa, Zea Mays
MAMAAAVLEEALRWGGGSVGDDNVAARRAEEAAIRRHEAASWLRKTVGIVCAKDLPEEPSEEEFQLGLRNGIVLCNALNKVQPGAIPKIVGVQSDTAVPADGSALCAYQYFENLRNFVVVIQDFGLPTFEVSDLEKGGKSVRIVDCVLALKSFSESKKTGRQAACKYGGILKPLVSGNYFILKNCDAFMNKNARIHTEEATLNGFRGEQNLSLDCSPESYEVITSDNLSTIIRTILLDKKPEEIPLIVESLLNKVIQEYELRFANQNLMDEEKQNNLTTKEEASFAVNGSNAAQKFHLKAEINFDLQHKQIKGLRGTVSSIKSGMEQLKLHYSEEFTKLGKHLYTISNAASGYHKVLEENRKLYNQIQDLKGNIRVYCRVRPFLPGQISSLSSVAGMEERTITIMTPTKYGKDGNKSFTFNKVFGPAATQDMQPLIRSVLDGFNVCIFAYGQTGSGKTYTMSGPKVLTEESLGVNYKALNDLFNLQAQRKGTIDYDISVQMIEIYNEQVRDLLQDSGNRRLEIKNTSQKGLAVPDASIVPVTSTSDVVELMNQGQKNRAVGSTAINDRSSRSHSCLTVHVQGRDLTSGTVLRGCMHLVDLAGSERVDKSEVVGDRLKEAQYINKSLSALGDVIASLSQKNTHVPYRNSKLTQLLQDSLGGQAKTLMFVHISPELDAAGETISTLKFAERVASVELGAAKQNKEGSEIRELKEQIASLKAALAKKEGEPENILSTRSSPSIYRIRKGNATPATPKDRQPMEEVGSLEVQNVFTPAQKRSKMHLLGILTENNSSNSVQNCNVPQKEIGLGGWVDKMALGDNHFENSNSILELEPDTAQLPTSFYHQRYSPVQQSCRTESVPSLGLHGFDSATSCSNQEIVVSTMGLKASGVANRGASTVKKYEATSTRSTNLASKSPLLQKKLQTPTRNRNQLTSSTIGGRRTPNGKIGIAK

SEQ ID NO: 68742 - protein, 401 aa, Zea Mays
MFEQFRELGASLFGTENKEGCSLQVLEGDIQEPIFLRGKSFSSINFWMNKGHLRSSTHYDPHHNLLCVVSGRKKVTLWPPSASPFLYPLPVYGEASNHSSVSVEEPDYSIYTRARYMKEYSETVILNCSDVVFIPEGWYHQVDSDDLTIAVNFWWKSRIMTQMLEHMDAYYLRRIMSRLVDQEMSIMAQKSPFGHLKDCTDIQHMAKTLTGFQLFNLQKDSPLRTLEPSTLQALYELISLVHDGAEAVSQMDKIEATSQNKSSNQRDDTDTSAAADDSSLLDKDPVAKIILPVEPLELRTMLLAMVHTFPRTLENLILNMLGVGAEILTRKFDEMDQQTTKEEQSEFYKIFYSVFDDQYAAMDALLNGKELFSFQIFQNVLDKYLGVHVDRPSRFVTRTNQ

SEQ ID NO: 68743 - protein, 550 aa, Zea Mays
MSTEDEKLLKEAKKLPWDERLQHKNWKVRNDANIDLAALCDSITDPKDARLREFGPLFKKTVADSNAPVQEKALDALLAFQRAADADASRYAKEVCDAIVAKCLTGRPKTVEKAQAAFLLWVELEAAEVFLESMEKAVKNKVAKAVVPAIDVMFQALSEFGTKVVPPKKILKMLPELFDHPDQNVRASSKGLTLELCRWIGKDPVKSILFEKMRDTMKKELEAELANVSGFAKPTRKIRSEQEKELEEEAVPETSGANTSEEAVADAPVEIDEYDLVDPVDILTPLEKSGFWDGVKATKWSERRDAVAELTKLASAKKIAPGDFHEICRTLKKLITDVNLAVSVEATQAIGNLARGLRAHFSGNARMLLSVLLEKLKEKKPTMTEALSQTLQAMHKSGCFTLIDVIEDVRVAVKNKVPLVRSSTLTWVAFCIETSNKATVLKLHKEYVPICMECLNDGTPEVRDASFSVLTAIAKMVGMKPLERSLEKLDDVRKKKLSDMIGSSSDTVLSSGTVLYEDVCNLSAFFSQVPIYSSYAALFFLKLPFVIVFC

SEQ ID NO: 68744 - protein, 262 aa, Zea Mays
MAPRLLACFGRGVAAAPDDATGEGQLEAPPAGPVLVELFGSQGCGASPEADAVAARLAQDSGSGDGAVVVLAFHVDYWDYRGWKDPFASSAWTVRQKAYVEALRLDTLFTPQVVLQGRAHCVGTDQDALALAVRDAPRYPAPAIKRPSPATLQASFTGTLRSRVEGPGGASVLVALYESGLVTDCGRGENKGKSLLNDHVVRRLEKVAAVREGASPKKTVSGTVQFPLWDGFRATKCGLVLFVQNAALQVLGVQHFDLPDNV

SEQ ID NO: 68745 - protein, 198 aa, Zea Mays
MWSTSKHKDTCMKNKISREQVKFPQGTGSQSYVAKAYSLKQEKFKDTEPSAIDLFKEMHCSKKKGFSETVQKAIVDMESMAATPVEDGHHSKSSTEVVSQVLPKSSLFLQNVGLATSNRSSSGNVSAKVQQLESQLETERQEKDGLRDEVQSLKAKTQASDETIAKQSDEIADLKKSIAENNSLLRQILSINRSQVSP

SEQ ID NO: 68746 - protein, 567 aa, Zea Mays
MLFIDEVHTLIGSGIAGRGSKGAGLDIANLLKPALSRGELQCIASTTLDEHRLHFEKDKALARRFQPVLVNEPSQEDAVKILLGLREKYETYHKCKYTLEGINAAVYLSARYIPDRHLPDKAIDLIDEAGSRARMESFKRKKEEQCSILSKSPDEYWQEIRAVQSTHEVALANRLKYSLDENDKDDGVNIEVIGDNKIASPSMPPTSVDEPILVGSEEIARVTSLWSGIPVQKLTADETKLLVGLDDELRKRVIGQDDAVVAISRAVKRSRVGLNDPDRPIATLLFCGPTGVGKTELTKALAASYFGSESAMIRLDMSEYMERHAVSKLIGSPPGYMGFGEGGTLTEAVRRTPFTVVLLDEIEKAHPDIFNILLQVFEDGHLTDSQGRRVSFKNTLIVMTSNVGSTSISSGRRSIGFSTQRDTEETTYAAMKSLVMEELKAFFRPELLNRLDEVVVFHPLEKTQMMAILNLILQEVKSRLLALGIGLEVSESMKILISQQGYDRSYGARPLRRAVTQLVEDVISEAILFGQFKPGDTILMGTDATGKPCLSRLNDQTVQLSDTAPTI

SEQ ID NO: 68747 - protein, 226 aa, Zea Mays
MVAWKRWGATASATTSSSPAPSPLGRSRGSRASASVCYLPGCSSPASRRPMERSLSTSGQSGSRSPPLGSNPAPGASSDWRRVLDGCVEEVGGYHVGYDIKLSSTESPRSVTGLEGVRVRVLFAWVPITGVEAVDGEVTVHIGPIRKSFPAVGFKSSPRCIIRLEAWSLVMGWRLRIQANITDHNIKCMRQGKEANRCRVCRLLDDHTYQKGFSSIIGKVSQLDIA

SEQ ID NO: 68748 - protein, 65 aa, Zea Mays
MCNEPTTVFYACNTSFVLSCKNEKVVVRKLGFKCKGDDKTCIWVPKIIVTNLAGPNKSWVPKTQA

SEQ ID NO: 68749 - protein, 209 aa, Zea Mays
MIVMSLLYVNKEFLRNRSMDENQLAQQMWNSVAANDKKAAYSLIVRSRANVNLVHGEIHSSPFLTLGKALQQEQPASPPVGSPRFFDCNSHDKISREPLSPASTSSCRDGMEDGCEGLSLLHLACRVADVGMVELLLQYGASVNMNDSMGRTPLHHCILKGRHRHAKLLLSRGADSQAMDRDGRTALQYAINGGTSDEDILALLQDHSR

SEQ ID NO: 68750 - protein, 811 aa, Zea Mays
MSHRGGLTYGRIPTSRKALASSWMDQSTLVGRESQMNELRKYQTTARFKDWQVMSVWGIAGVGKSDLVKNLYYERMLKEDPMFDKYGWVHVSHPFNLRDFSRNLLLDFHSDAVGIRDPIQECHKLLKEHQCLVVIDDLQSVEEWDLIRPALVSRHSKSVIIVITTDEKIATYCADDEEVVFNVKCLEAEASFDLFKKEVQKKSQTSPLMNSNNKELEQLILKCGRLPKVIVAVAKFLAPKTVTCMDSTKTLNHRFMQELESNPEFSVLQDLFAWMHSYFRACPDFLRPCIFYMSIFPGSQIIRRRRLVMRWVAEGYSRDTKDITAEEKGEMFFSMLVNLSMIQPPTCRVITDMKMVLCQVSAFFHEYIISRPVEENIIFALEVFALKGRCLPTTGRTGRHLVIERCWDRDRIVFESIDFSRLRSLTVFGQWESFFISKSMKVLRVLDLENATGVTDKDLEQMVKLLPRLKFLSLRGSTGICHLPSSLGELRQLETLDIRGTFIAKLPASITKLKKLQYMRAGTISLAKESSTSYSSASRLPNLCKSCKLVGVEMPSGIDELTPLHTLGVVNAGIGGGKATLKELKKITQLRKLGVSGVNKKNNKEFCAAISCHVRLESLSVWLSKGNQGLNEISSQDKPLQNLQSLKLYGLGSEVPAWMKDLPKLTKLDLHMTISAEVDIIKVLGEIKELCTLRLCVKPLQDGDGKLDFCVWVNGIQQRCYLNLKILEITCSSKLNISFGSEAMQNLELLRARCCSGSTLKFMEIKNLSKQKLKEVQLIGSHDTALKDDMEKQLKEHPRKPPLKLEEPEGC

SEQ ID NO: 68751 - protein, 67 aa, Zea Mays
MISILAQERLLGFALGSVSIGGFVLHQRRAIYRSIAEADGSPYFYQVSIWLLPPSLQPSSRLLSELV

SEQ ID NO: 68752 - protein, 94 aa, Zea Mays
MFGAPPDCPVTQMSEAPTVRIQRPGDVAGAPDMRQKPSPTVLLVVGAINTPQPPQFNASKFSAFKHLTRAITFNTKTQPKRLNPLPSPKIIPIK

SEQ ID NO: 68753 - protein, 262 aa, Zea Mays
MGGVRYFQGLCAVHILPLATFFWEHLLIVCELLKANLYEFQKFNRESGGEVYFTMPRLQSIAIQCLEALQFLHGLGLIHCDLKPENILVKSYSRCEIKVIDLGSSCFETDHLCSYVQSRSYRAPEVILGLPYDKKIDIWSLGCILAELCTGNVLFQNDSPATLLARVMGIIGAIEQAMLAQGRDTFKYFTKNHMLYERNQESNRLEYLIPKKTSLRYRLPMADQGFIEFVACLLEVNPKKRPSASEALKHPWLSFPYEPISS

SEQ ID NO: 68754 - protein, 496 aa, Zea Mays
MDYLRTVVPSQLLAERGSNLVVINPGSGNVRMGFASQDVPFNIPHCIARHINPQEGEEPRFSVRDQMLNCHATSSQNAERESAYDIIAALMKIPFLDDEEMPSPNQPLPPKMGRVDGFSSQQNRDDNKFTWTDVSERIIKPSTPFDRSVYKDAEEDTLPSTSDDDNGQDFKENKYKEMIFGEDALKIPPSESYCLSRPIRRGHFNVSHNYSVHQVLEDLRTIWNWILTEKLHINPRDRGLYSAILVLGETFDNREIKEMLSIVLHDLGFSTAVVHQEALSAAFGNGLSTTCVVNIGAQVTQVVCVEDISRCLLWVQRRHGTWPNFQTDPMSNPIDMLMLNKIKESYSQIKTGSIDAAVLVHSYDNERSGGHQKTRLSAINVPPMGLLYPRVLVPEEYPPPPRSWFQDYDDMLEDTWQTSDGLYPSGNGGFGMWDSYPMFPTRLKKFDNIGLVEAIISSVLSTGRVDLQKKLFGSIQLVGGAASTAGLAQVLEQSHR

SEQ ID NO: 68755 - protein, 467 aa, Zea Mays
MIEQYSAFMSPVAAADSMTPKKFMALVSAKIQTYFCRGGSIQRAVRRMAGGGGGRRRPGALADPRTGDASSASASCSGDDTSIGSATAKREGARRCIMQRYRSQLEQEVKKLQRQLQEEIDLHLALADAITYNAALILKSSIKLPDKAHELLISISSLEIAITKLEEDLNHLHYQLYHARNERFLAENKPGYLLPTRSDCQPSTACNCTWEEPEQMLRELIFRDYHSVQEDFSTEPEDQQDDEKYVKGRERVSLNMLLEKHQDISSTGLFVHRDEEMQEACSMEKEGEEDQKIDMLPFNLPNLKKGNMSENLWNNPNQLSEEMVLSMKDIFLNLSTSSKMSPEEPFSNSSSSAEHLSGSTLTTLSDSSVIASVQPSPSMYLNHDDGNFDPYNVNGKEAQRDIGSYSSVAEVSWMYIGNEQLEYASGALRKFRFLVEQLSKVDTSCMNCDERPIWHTVSLKTTLSFSR

SEQ ID NO: 68756 - protein, 431 aa, Zea Mays
MGLAGGIVRRVFSKSPCSSAGSRGHSTDACMSTADSQEKGSAEHRRRWGSLRLYLCGEEMNAAAEEEEDGDGDTVSVKSFETCCVMPEEAHVVVPVHHRLMSAAHDGNDQSRVPGGADEEGAATLIQSAFRGFMSRRQLQEARARTRTRTRGREPEPDGAKDQEPSSPTWGPSVATSVLVQVGDESSSLGNLRLRLSEESASVQQQRSSSQRSSSRPPPAFRVKEEWDDSTVSSNVSRMRIQNRIEATTRRERALAYAFSQQLRSCGGGTSKKRSSARAEGQGEFNVGWSWLERWMATRQAEPADDCASRNADTGSATGRRVVVVRRRSDLAVEEKESCASNDVSVVSFDASSGLACHRPTGNKSRLKGGRSLPRRKQVAASASASDHRFQERSHKVSKKGHQRVEQEPHKDRFDAVAALDDDACQPPTDY

SEQ ID NO: 68757 - protein, 260 aa, Zea Mays
MATPRSPSPSAAARLDSAPLLGGASGGGSRRRDGALRRPSLRGAARLLRRGGRRAMREPSVLVREAAAEHLEERQADWAYSRPVVALDLLWNLAFITVAAVVLVLSRDEDSPMPLRTWVAGYALQCVVHMICVAIEYRMRHGQRGSAVAGAAPADVERGSDASSSSSDEDDRELDLHGRRTDYASIAKHLESANTMFSFIWWIIGFYWISAGGEEVIQDAPQLYWKEHLKMTFVKSQDTNFGGRMSLRSKMLTPWVLLVE

SEQ ID NO: 68758 - protein, 262 aa, Zea Mays
MTAFALGRLWPDADGGGECLLGRVRVLQADTLNLVQGGLTAGSTASESSCAATLQAYEDDVDLSASAYWVPGQASNKYLNYGAGISEVEIDLLTGAITIIRGDLVYDCGKSLNPAVDLGQIEGSFVQGIGFFVYEEYTTNSDGLMISNSTWDYKIPSVDIIPRQFNAEVLNTGYHKNRVLSSKASGEPALVLASSVHCALREAIRAARVEFADSTVSSGHSPLEFQMGVPAPMTLVKELCGLDIVDRYLEGLSTCERAAGGA

SEQ ID NO: 68759 - protein, 190 aa, Zea Mays
MSGAERLIVDAACQLAAHDHDVHVFTSHHDKKRCFEETLSGLFPVTVHGDFLPRHVFYRFHAVCAYLRCIFVALCVLLRWPFFDVILVDQVSVVIPLLKLMASSKIIFYCHFPDLLLAQHTTMLRRLYRKPIDMIEESTTGMADLILVNSKFTAATFARTFSGLHARGIEPGVLYPAVSVEQFHEPHAYK

SEQ ID NO: 68760 - protein, 433 aa, Zea Mays
MATTALLRALRRPSSEAALRLKSMKEFSEKLDVVKEDLKVRTKKTTETIYKRVDDVWSEAEETSKKVTANIKEKMFAAKEEVKESFGVGKEESTSCRDGLPEGSKHEKTEASSHSDGTTEDATDSHTLFTKLKSTISSASPVVSGAFAKLKDTKVSTLAKQGYEIVKDELSSNSSRKKKHQARHASAKVEKSTRTDLVLTPTKKTVLGEKWEEFKNKIRGHPVYRRVDEYTKPVVTKGQEVAEDVRERWETSDNPVVQKIQDLNESLLEETSAAVTFREIRQRDPSFSLSDFVADVQEMIKPVLTAYSKGDAETLKNYCTKEVIERCKGEREAYASQGIFFDHKILHISEADVLETKMFGSSPIIILRFQTQQIYCVRDREGQVTEGGQDTIQTVFYSWAMQLMDSDEVPEEESYYPVWRLREMQQAGIKALI

SEQ ID NO: 68761 - protein, 87 aa, Zea Mays
MRTQSAATILQWREYWNWRLVVRTEERTARKVSMAQTARELDARRFLFRCSMHDAWTDGKQGRATKSRARRRGLDMVSKPDRGDSLA

SEQ ID NO: 68762 - protein, 432 aa, Zea Mays
MSREAQKLDCAAGAGGIGVLSLDLLGQVLEHLREPRDRKTCRLVSRAFERAEAAHRRALRVLRREPLPRLLRAFPALERLDLSACASLDDASLAAAVADAGGGLAGLRSVCLARANGVGWRGLEALVAACPKLAAVDLSHCVTAGDREAAALAAASELRDLRLDKCLAVTDMGLAKVAVGCPKLEKLSLKWCREISDIGIDLLAKKCPELRSLNISYLKVGNGSLGSISSLERLEELAMVCCSGIDDEGLELLSKGSDSLQSVDVSRCDHVTSEGLASLIDGRNFLQKLYAADCLHEIGQRFLSKLARLKETLTLLKLDGLEVSDSLLQAIGESCNKLVEIGLSKCSGVTDGGISSLVARCSDLRTIDLTCCNLITNNALDSIADNCKMLECLRLESCSLINEKGLERITTCCPNLKEIDLTDCGVDDAALG

SEQ ID NO: 68763 - protein, 425 aa, Zea Mays
MASSSSAATTSGDSQGLKARDACIVGVARTPIGALLGSLSSLPATKLGSIAIQGALKRAKVDPALVQEVFMGNVLSANLGQAPARQAALGAGLPNSVPCTTVNKVCSSGMKAVMFAAQSIQLGINDVVVAGGMESMSNAPKYVAEARRGSRFGHDVLVDGMLKDGLWDVYNDFPMGMCAELCSDQHSISREEQDSYAILSNERGIAAQDSGAFSWEIVPVEISSGRGKPPVVVDKDESLAKFDPVKLKKLGPTFKTNGSVTAGNSSSISDGAAAIVLVSGEKAKNLGLEVIARITGYADAAQAPELFTTAPALAIPKAISNAALQTSQIDYYEVNEAFSVVAIANQRLLGIPSGKLNLSGGAVSLGHPIGCSGARIIVTLLGILRQKNGKFGVAGVCNGGGGASALVLELICSAARKSYSYCYKF

SEQ ID NO: 68764 - protein, 300 aa, Zea Mays
MSSAMVERATSDMLIGPDWAMNLEICDILNREPGQAKDVVKSLKKRIAHKNPKVQLLALTLLETMIKNCGDVVHMVVAERDILHEMVKIVKKRHDYHVKEKILTLIDTWQEVFGGARARYPQYYAAYEELLRAGVVFPQRLNGSVPIITPPQTQPLQNYPSSLHISQQEELELPVSDFPALSLTEIQNARGIMDVLSEMLDALDPGNREGLRQDVIADLVDQCRSYKQRVVQLVNSTSNEELLNQGLSLNDDMQRVLAKHDAIDAGLAVRVEKPKSLQSQIGSSSTRKPDTMEETIQRHR

SEQ ID NO: 68765 - protein, 119 aa, Zea Mays
MQRRVGMADGEARCRTLGAVIKEKDEEFALFLEMRRREKERGAAAAAADQLLLSGDVAAENGMLLLDPPPPAGGSFISASSSEPKPAAYKVAGGGFRRAPGGVDDFLNADASDKNDYDW

SEQ ID NO: 68766 - protein, 458 aa, Zea Mays
MAECSLATLRVRGQYQGRWTWSNSKLNMPIMDPKRNYALKIHLPCQSKAAREWTSVAFTPFGFHGRDHRVETSVKCYCLQPLMDSESMVSPNLILISDEALLTISMVFAYLAGVVPSGQTSPRVRNQNVSQHIPEPSSSHSGRDLKFLPERNAAFDPNDMWSEVRNISGSSELDGIRWLQVSTTLIDSLIQPVFMKWIEEEQALENGQINEKLMKTISSKLKEGNKILRRFNRFGKSELYLDMLFFLRFGSARCDSYFNVKFLAEHGERILEDLVISLADVIASIYLELMSVDGDMSAEVVGSSLVLCSLSTRELQKLRNEVAINWWLHQYFKSVVSMYEDRFELYVLCSKKCEKTADNQAERANWWRIASGKPNVLTLDYVNISPFSLPARRTKELRALIGWRYYFSLFLELSDIAMPFIRVAISKVSSAVSYFWVSMIGRSLGLIFSGIRQSLGWK

SEQ ID NO: 68767 - protein, 991 aa, Zea Mays
MACHICPLFNLRLLLLLGAVLGNGGLGRGGGAEASDRADPDPYSILMWHDYSPPSPPLPPPDPPSPTATCEGDLHGKGDFHTRCEVSEEVELDGDVYITGNGSLVLLSGASLTCEKYGCVISANFSGEVRLSRGVRVTAGRVSLVATNITVADTVVVNTTALAGDPPDRTSGVPTGTHGDGGGHGGRGASCFVKEGQTQEDSWGGDAYAWSDLEHPWSYGSKGGSTSVEKDYGGDGGGIVWLFAEDLVMNGTVLANGGDSNEKGGGGSGGSIFIRAASMHGGGKISASGGDGLAGGGGGRVSINVFSRHDDTQIFVHGGRSSGCPDNAGAAGTLYEAVPKSLIVSNNNLSTQTDTLLLEFPNQPLWTNVFVRNRAKVAVPLLWSRVQVEGQLSLLSGAILTFGLTRYPYSEFELMAEELLMSDSTIKVFGALRMSVKMLLMWNSRMEIDGGGDSIVATSLLDASNLIVLKESSVIHSNANLGVRGQGLLNLSGDGDTIEAQHLILSLFYSIQVCRVEDIDVWGLVQGTVIHFNRARSVTVHTSGTISASGLGCRTGVGQGKMLSRGICGGGGHGGKGGDGFYKGNLAEGGAIYGNADLPCELGSGSGNDSTELSTAGGGIIAMGSWEYSLPSLALYGSVESNGGSYTNGSVGGPGGGSGGTILLFVHTLSLAESSVLSSVGGFGNAGSGGGGGGRIHFHWSNIPTGDEYVPVAAVKGSILASGGVSKGLGYSGGNGTVTGKACPKGLYGTFCKECPLGTYKNVTGSSKSLCFPCPPGELPHRAIYINVRVLSGGSVLFFGGHGCHELASVLGTLSNVEGFAFQRDVSYTAFLDRVHGEEVALNKLGLWRVPHPWLNMFVPRSRIADFDRGVFKGILQGTDIVGPLIVYPLNKSMWDDGMSAATPSEDVFYAVSLLFSSVAPNDLARLQEQNRRILRFCDLAGIQYKTYLARHTDRSDWVRHFGAAKWNRFVEMKNKYDPKRLLSPGQDIFN

SEQ ID NO: 68768 - protein, 102 aa, Zea Mays
MHVGSGPKLPLQRDMNKFNLFPHGQPNVMDFHVAALNVCIREAQDMGKTTVANFMPDPLDKEVHDWVVIPISFFINFLYLESGIELSHHFVVPGLFHSHYVF

SEQ ID NO: 68769 - protein, 340 aa, Zea Mays
MSTKKVLCKFFMHGACLKGEYCEFSHDWSDQANNVCTFYQKGACSYGSRCRYDHVKVSRNPTVPPPRPTSSTSRRASTSLQLSSYNHPPHMVHQTDSSNQRHQISVDVLAHSASKPAWRNDFQHDIVSDDGIDWSSNQNLINQTSLKPVDLPICSFAAAGNCPYGEGCPQMHGDLCATCGKLCLHPYRPDEREEHIKLCEKNHKRLVALKRSQEIECSVCLDRVLSKPTAAERKFGLLSECDHPFCIECIRNWRSNSPASGMDVNSALRACPICRKLSYYVIPSVLWYFSKEEKEEITESYKSKLKSIDCKYFDFGTGSCPFGTSCFYKSVLCSLMSWIA

SEQ ID NO: 68770 - protein, 299 aa, Zea Mays
MDDAESASRAGRRRAAAAAGMRLFSPEYYALCAGGGMLAAGATHLAITPLDVLKVNMQVNPMKYNSIFSGLNVLVKEEGPSSLWRGWGGKFFGYGVQGGCRFGLYEYFKKRYSDVLVDSNKSTIYFLSSASAQIIADVGLCPFESVKVRVQTQPMFAKGLVDGFPRVYATEGLSGFYRGLLPLWGRNLPFIQKKKEDCSTIQQLGATCLAGYISGAVGTVVSNPADNIVSSLYNKKAENIIHAVKSIGFRNLLTRSLPIRIALVGPVITMQWFFYDTIKILTGLPTTGGLPRELEEANI

SEQ ID NO: 68771 - protein, 549 aa, Zea Mays
MSSTAAVALNRRTRSRPPSAASSRRSDDPTAAVASTANGNGNVPTKAASPDHASGERTVKKLRLSKALTIPEGTTISEACRRMAARRVDAVLLTDAGGLLSGIVTDKDIATRVIAEGLRVEQTIISKIMTRNPLYVMGDTPAIEALQKMIQGKFRHLPVVENGEVIAMLDITKCLYDAISRLEKAAEQESALAAAVEGVERQLGGNFSAPHNLIETMRERMFKPSLSTIITENTKVATVSLSDPVCVAARKMRELQVNSVIITAGNLLHGIFTPRDVLMRVVAQNLSPELTLVEKVMTAHPDCATLDTTILDALHIMHDGKFLHIPVLDGDGRVAACLDVLQLTHAAISMVEGGPGAATDVANTIMQKFWESALALEQPPEEDFDSHSELPLVMPSDARDGSSSIYRPAVDNLFVFKLQDKKGRMHRFTCGSESLDELISSVIQRLGMVDEKRVIQLLYEDDEGDKVLLTTNSDLTGAVFCAKSSGLKVLRLHIDNSDSSNEVVTQPLPELASSQGSQSMHVHYGYGLMACAIALTGVAVIVYLRHSKA

SEQ ID NO: 68772 - protein, 160 aa, Zea Mays
MCCRCAEGGEEGGEGHQGGRQAQRHGIRQATARTVGHLSKSTEVMKLVNGLMKAPEVAATMQEFSKEMTKAGVMEEMVNDALDSTLDSEDMEEEIEEEVDKVLTAIAGETASELPDAVRKEKEKMKQPSTSVPEERTAIAEAVDDGELDQIRERLARVRS

SEQ ID NO: 68773 - protein, 162 aa, Zea Mays
MGTATAVRARAAGRRGAHVLAHYSVLTSRGADRSGGRWSGRQIGREPWAYETYGRRGAGMYMYCSEGGIYEAVTMHAWASLSPFPCVLLRPGMGRRGTDLGGEYWRRSSEVGTEHVQKDGPCTCFCTGHRGTYVPVEIGAHRRRRRNKKGRTRTSSGRRVQG

SEQ ID NO: 68774 - protein, 140 aa, Zea Mays
MASSLSRALLRRVAELARGRLRANHRMLSSASSTAAIERASQLPAEAQAVRMTEGCVRRLKELHAKKPSAEGKMLRLSVEAGGCSGFQYSFALDDKKNADDRFFETDGVRLVVDDISYNFVKGATVDYEEELIRSTFVVV

SEQ ID NO: 68775 - protein, 793 aa, Zea Mays
MEKFQLKELKLHFIVIGLHGGALLGVTYRTSRRISPLTATAISTVQSMPLSGFGGSGSSFASDDPFSSKEGPPQNFQLYSWETYQPVSGLLAQPEWTVWDQTVEYCAFAYQQYIVISSLRPQFRYLGDVSIPFATGAVWHRRQLFVSTPTTIECVFVDAGVAAIDIETKRIKQEMKAREAQSRAAEEHGDLALITVEAPQVTVSEKVSLRPPMLQVVRLASFQYAPSIPPFIVPKQSKFDGDDSVFQKELDDRRYAEVAVAGGGVSVAVTRFPPEQKRPIGPLVVVGVRDGVLWLVDRYMCAHALSLSHPGIRCRCLAAYGDPVSAVKWATRLGREHHDDLAQFMLGMGYATEALHLPGISKRLEFDLAMQSNDLKRALACLLTMSNSRDVGQETAAADATDVTQILSLAVAKQAKQESLTDAVQGIVKFVKEFFDLIDAADATGQSDIAREVLKRLAAAASVKGALHGQMLRGLALRLGNHGELTRLSGLVSNLITAGHGREAAFAAAVLGDNALMEKAWQDTGMLAEAVLHAQAHGRPSLRNLVITWNKMLQKELDHTPTVKTDAAAAFLASLEDPKLTSLGETEKKPPIEILPPGMPPLSAPPIVIKKAGAKPGLPNAAKASNGPIGAPMAQGAPMAHGTPGPQGVPMNQVTPSQGSHDEARPSDATVADAAAAVAEGTAAPPAAEGTSAPPAAEGTATPSSEEAKAAPGNEEGTSNPINEEATAAAVSVAAGSPDSAAAPAADTSSDAPAVNPTEDTVSAPSTEAPPELTDKPSSAEASLPPPPSVSGV

SEQ ID NO: 68776 - protein, 1073 aa, Zea Mays
MDKQSDAQGSEKVAEEKVRVLTHHTCFMEKGPSRQLDEKELERKLKKDQKAKEKEEKKLKAKQKEAARLQAQATSDGTKKAERKQRKKAVEDENPQDFIDPNTPNGRKKLLAPQMAKQYSPSAVERSWYAWWESSGYFGADSASTKPPFVIVLPPPNVTGALHIGHALTVAIEDAMIRWRRMSGYNALWVPGVDHAGIATQVVVEKKLMRERKLTRHDIGRENFVSEVLKWKDQYGGTILNQLRRLGASLDWSREAFTMDEQRSKAVTEAFVRLHKESLIYRDYRLVNWDCTLRTAISDIEVDHIDLKEDTMLKVPGYANPVQFGVLISFAYPLEEGLGEIVVATTRIETMLGDTAIAVHPEDERYKHLHGRYAVHPFNGRKLKIICDAELVDPTFGTGAVKITPAHDPNDFEVGKRHNLEFINIFTDDGKINSNGGAQFDGMPRFTARVAVIEALKEKGLYKDTKKNEMSLGVCSRTNDVVEPMIKPQWFVNCSTMAKAGLDAVRSKKIEIIPQQYEQDWYRWLENIRDWCVSRQLWWGHRIPAWYVTLEDDLDKNLGSNNDRWIVARNESDAKLEAQKKYVGMKLRLDQDPDVLDTWFSSGLFPLTVLGWPSDTTDLRAFYPTSVLETGLDILFFWVARMVMMGMQLGGDVPFQKVYLHPMIRDAHGRKMSKSLGNVVDPLEVINGMSLDGLLKRLEEGNLDPNELNIARDGKTKDFPDGIAECGTDALRFALISYTSQSDRINLDIKRVVGYRQWCNKLWNAIRFAMGKLGDDYIPPATVDVSLMPPICKWILSVLNKAVGKTVTSLEAYKLSDATSAIYSWWQYELCDVFIEAIKPYFSDSQEFESARAASRDTLWICLETGLRLLHPFMPYVTEELWQRLPQPKDSSRRKDSIMISEYPSLVEEWSNGGVENEMDIVLDAVNKIRSLKPPTDSNERRPAFALCRGQEVAATIQCYQSLIVCLSSISHLKILTESDETPADCATAVVNKDLSVYLQLQGDLNEDAEREKLRKKKDEIQKLQNALAQKMDASGYREKAPQSVQEEDMRKLTALLEQLEVISEAEKKLDSN

SEQ ID NO: 68777 - protein, 570 aa, Zea Mays
MSSTSSGRRAPSSSAAVASSPGQKRARDEASSGSPSDPDAAKNPRRAFASSPFADFGTYMAAKNSKLAAQFDADANTSGTDAGGLFDGVSIFVDGFTVPSSQELKEIMLNNGGRFVNYFSRHTVTHIVCSNLPDSKMKNLRAFSRGLPVVKPAWVVDSLAENRLLNCAPYQINQNSSSSRKQMKLSSFFSEKQNEICHKGEQNNQNKDIEFQPSSAQEGSQYQSGDCESEASMDTLELSKDSLSSDEQKASAFEERESGDFTVDEGEYDYETACSESRNDTDGNLGVPQSPNAKSRCSNLFSTRSTGSHLSLSLEKSAAKPSGRPHSTLTDPNFVENYFKYSRLHFIGTWRNRYRKRFSNLLEAKGIKLSADHSGKKKTIIHIDMDCFFVSVVIRNMPELHDKPVAVCHSDNPKGTAEISSANYPARNYGIKAGMFVRDAKARCPHLMIVPYNFDAYEEVADQFYGTLHKHCSKVQALSCDEAFLDMTECLHDNPEEVTQRIRSEIFHATKCTASAGIAENMLLARLATRSAKPNGQCFIPSEKKMAQCFLERSTLREYPRPRSILQRRC

SEQ ID NO: 68778 - protein, 633 aa, Zea Mays
MSDDGNAKFASLQSAKWADAGPVECIDPKTHKVDNVSRFGFAAGQERRISAYMDQEEYLLGKREVEARIDREIRPYGQQFPAARDSSLWVSQEKALPDNGLDPWVSKFSNQPAEMSICTGTMPASIISSVPVRLSGHYAGRSNLDTTNSVPIRSTEAFGQQKHRYWSSSPPQAHPPSSTAPFARQGSPNHDESDFYPSGSFSQLGQDPQEEYSQRALPVLAKGSHVVVHNDELTQGQPSLQATLQTQKYPIIQSKSHINPSDQLQASFLCENSPSLFRPSIQLGEVSLPSDSTPISSDLTSASNLLAGLIKSGFKPSNHSDAQPLGPSGSLLVASLSLQNAAGENTILQTQTPNTSRPPLPPGLPPPPSTQSAEKAAPLSSLLSSLVAKGLISSPASDSSDAVISQPNKESSINGKDVAASGVPLPALKSSFGKVSSSNSDSSAPPNASLPKAIEIEMGDLIGLEFKPEKLRKYHEHVISYLDDQSHQCKMCGNRFGLEELSLHTSSCGPRESRTIYTGIAPKRWYPSRNIYIDGSHEIEDSAEASDAGLGSAEVCEFMVHADERQIICALCGEPFDDVYSFEKGNWMYKDAVFLDYAKGKNSCGNNVKGEEHVPIVHVRCMPRGSNDGMDVD

SEQ ID NO: 68779 - protein, 1948 aa, Zea Mays
MATPSYAAVKCLNTSSSSRKRFSFKSFSQRVEEIDIDVYRSLHTLKAEPSSGSSFFLDAIVEWRELNTAEDFISFYEEMIPLVQTLPQIVLHRDKLFSALLQRVNMSARLSLEPILMLIAAFSRDILEDFLPFLGRHASALLSLLNDGGDRDPEILEQVFTSWSYIMMYLQKYLVKDTVQILRITAALRYFPKDYVREFMAESVSFLLRNAPNNQLTQGLLKVLLEAAKQPSPARIDGVVSLLWHVMKGTSTKLHSKAGQVLKFLLSKSIVSTLRDKFPDDKVKMIKLVEDVPTILGNLSIISPFYAPVFKLKNPRVIVFIKKLLVKGPQVAQHFESQILRVSSMEVTKEFDPQNLLELFSIFAFNLSSPTKDVRILTLRILSYFVKMDQRLITDEERPHKRQRTEVSGEEAVAKYANVVDILLIIESMPISVSTSRKIAIFISRIQMSLSSKMVHDDYIPPLLHGIIGILYNRFSDLWPQTLDCLAVLIRKHKELVWGQFVPFIAIHQSKGLTVKNQEKLEAATQPQSIFDCFNLYLAMDFDCTPAVTVATLLLQSLQRIPDVAESRSRQLIPLFLNFMGYDDSSIFSADSYMPEKCKGKQWKAILKEWLNLLRLMHNARSLYQGNFLQEVLTKRVLDDSDPEIQAKALDCLLNWKDEFLIPYSQNLKNLIDVKTLREELTTWAVSHDSLSILKDHRSRVVPLVIRVLAPKVRKLKLLGSRKHTGASHRKAILRFLLQFDSNELELFFSLLLRSLIPGSLQLKMFGSQPDNLLGSFSDIVGTSTEICVENFTWKKANGFIHLVEEIFGTFDMPHISPFLNVLLIIVARLLESCMRNLRNESDGKYPCNQTNDHGNGCSINSEVGNSVNVDECFKEMHLEGHMEQPHSITQTSVSIKQLKDLRSSCIRVVSSALSHYESHEFGENFWGVFFSSVKPLIDCFTQEASSSEKPSSLFACFMAMSRSPKLAPLLGSNNLVPAIFSILTVKTASGSITTYALEFIENLLRLDIDLQQQDEHLVKKVLLQHMDVLIHSLHDFVNHRKELNRRSGTWLGQRELRLFKLLLNYITDPSAADNFIDLILPFFSKKDLNSDDCLEALCVVRGIIQNLRCKVSEKVLNALNPLLAIVGLELRLCICDIYAGLSLNDPSMLFLAGLIGDLNAVSASELGELDYDTRLNTYDKVRPQLFLGLTEEHVGAILSHCVYDMSSEELILRQSASRALQSFLDFSASVMNNDVSKYSIDDKFRENNTRSICTMGCIQKILEKTYLHNMGVAMTKDVSIQKEWIILLREMVSNFNHLASLSSFRPLCKVDIEEDFFHNITHLQAGKRSKALLLFRQGIKENNFSEDITMKVFVPLFFNMFSDVKAGKGEQVRDICLDTLSAVAAKVQWEHYRTILKRCFRELNLRPDKQKIILRLICSILDAFHFMKPANDASGNSDALSEDIDSSLTFSLVTVSSDKQQYMQKVVFPQVQKLLGSDPEKVNVNINLVALKILKLLPVDYFESQLSSIIHRICNFLKNRLESIRDEARSALAASVKELGIGYLQFVVKILRAILKRGFELHVLGYTLHYLLSKNITADMYGRLDYCLEDLLAVVDSDLLGDVAEQKEVEKLASKMKETKKRMSFETLKLIAQSITFKTDLLKKIISPVSLHLQKQLTPKLKTRLEMMLHNIALGIECNSSTETSNLFIFVYCLIEDTITGSRSECKENTQSSPDQDSTVRKTFLGLGESGSQNSYILTKFALDLLRNRLKSIKLDKEDEQLVKMLDPFVDLLRKCMSSKHASVLSATFRCFALLVKLPLPSLRDNAITIKNVLMEILQRAGNSNGHLVTSCFKLLADLLRGFRISLSDNELQMLVHTPMFVDLQTNPSPVALSLLKTIVRLKLVSHEIYDIVVKIGELMVTTLTESIQQQCIQIMLQFFLNYPLSEKRLQQHIDFFLANLRYDEYP

SEQ ID NO: 68780 - protein, 252 aa, Zea Mays
MAPRSRAPSRRPLWFIVLVAFVCVVAIGAYLYTPQHYTACYLVPSEACNSRPPPEPARVYTDDEIAARVIMRDIIRARPVQSKNTKIAFMFLTPSLLPFEKLWEKFFMGHEDRYTIYVHASRDIPSHSSPIFAGRDIRSEKVIWGTISMLDAEKRLLAHALQDPENQHFVLLSESCVPLHNFDYIYSYLMETNVSFVDCFDDPGPHGAGRYSEHMLPEIVKKDWRKVVYSETAACDSYSRGHPLLWEVQALL

SEQ ID NO: 68781 - protein, 59 aa, Zea Mays
MSVSSKVFGLECAQSVTLMAKRNEVPWDVLENESFCLKTIGYKKLASGFVKAFVNHLNH

SEQ ID NO: 68782 - protein, 362 aa, Zea Mays
MPSCPPRRPVMSSTTAAAFRLGQRVHAAGDPRRLGTVRYLGPVEGHGGVWVGVDWDDGAGGRHDGSLAGRRYFVAVGECSATFARPTALSGGISLPDALRLRYRVQDFTKEEQDEMYVFSTSQKRVSVEFVGTDKVQEKLNNFNELASASVSYMGVSSIGAPNELNSLVPNLKLLDLTGNLFSQWQDIFSLCQALASLEVLNLTNNTMENDVVETPMLENIRILVLNNCGVTWELVEKIKVSFSCISELHLMSNRLNMIMTLDGKFVQGFNTLRLLNLEDNHIDSWDEIVKLSYLRSLEQLHLNKNRLKHVKYPSNLSPDGPIDDAAAVPFENLQVLLLGSNDIDDFSSVDSLNLFPSLRAF

SEQ ID NO: 68783 - protein, 119 aa, Zea Mays
MLGSIDCMHWEWRNCPTVWRGQFCGRNSRPTMILEAVASYDLWIWHAFFGMPGSNNDLNVLHRSPIFDPLHNDAMPPRALHHQWRVLVKISRELLVCCSRVGQYSAGQLMVGFAITSRR

SEQ ID NO: 68784 - protein, 429 aa, Zea Mays
MNQVMDALNFDYPDYEQLGRGAEGQKRKRVASVLDKEATKLAKKDKEIFEKRKLSPEPKIATSKKRKATTPKPKTSGHEGEAPATPSAADVEEILKVMTEPLPIKLSPLAPQLTKLFQKEKEPSATESPAKLKKQRIIQVADVIHQTPPPASASKVPITEGAYAAKAKATEALGAKAETAEDSDLETTLGDIDNMLLKMAEEEAAAAVVDTTIEKGKEQIEDTLEEENFNFQDILGHELSETEKEELKKYDVSCGYKPGAFLFGGVNEGKLRCLRNRTEAKVVRTFSKNVGLPKIEADLCRYRRQHVAGSLFYANFKSILLSKVLRMQQDLEDEKNEATIKDLENKVKDHEVALEKKDLVIHSMEGSLAEAQAKIDRLNSELLIKSKKSKQEKKNLETNLKTEIEKSSNLQKSLKELQDKCLDFGNRCL

SEQ ID NO: 68785 - protein, 988 aa, Zea Mays
MPVRSSVAMTTTAARALAALVLVTAAAAAAAVADDGAALVEIKKSFRNVGNVLYDWAGDDYCSWRGVLCDNVTFAVAALNLSGLNLEGEISPAVGSLKSLVSIDLKSNGLSGQIPDEIGDCSSLRTLDFSFNNLDGDIPFSISKLKHLENLILKNNQLIGAIPSTLSQLPNLKILDLAQNKLTGEIPRLIYWNEVLQYLGLRGNHLEGSLSPDMCQLTGLWYFLTGAIPDTIGNCTSFQVLDLSYNRFTGPIPFNIGFLQVATLSLQGNKFTGPIPSVIGLMQALAVLDLSYNQLSGPIPSILGNLTYTEKLYMQGNRLTGSIPPELGNMSTLHYLELNDNQLTGSIPPELGRLTGLFDLNLANNHLEGPIPDNLSSCVNLNSFNAYGNKLNGTIPRSLRKLESMTYLNLSSNFISGSIPIELSRINNLDTLDLSCNMMTGPIPSSIGNLEHLLRLNLSKNDLVGFIPAEFGNLRSVMEIDLSYNHLGGLIPQELGMLQNLMLLKLENNNITGDVSSLMNCFSLNILNVSYNNLAGAVPTDNNFTRFSHDSFLGNPGLCGYWLGSSCRSTGHRDKPPISKAAIIGVAVGGLVILLMILVAVCRPHHPPAFKDATVSKPVSNGPPKLVILHMNMALHVFDDIMRMTENLSEKYIIGYGASSTVYKCVLKNCKPVAIKKLYAHYPQSLKEFETELETVGSIKHRNLVSLQGYSLSPVGNLLFYDYMESGSLWDVLHEGSSKKNKLDWVTRLRIALGAAQGLAYLHHDCSPRIIHRDVKSKNILLDKDYEAHLTDFGIAKSLCVSKTHTSTYVMGTIGYIDPEYARTSRLNEKSDVYSYGIVLLELLTGKKPVDNECNLHHLILSKTASNEVMETVDPDVGDTCKDLGEVKKLFQLALLCTKRQPSDRPTMHEVVRVLDCLVNPEPPPQPQQQQQKAHAHHQLPPQPSPPAYVDEYVSLRGTGALSCANSSSTSDAELFLKFGEAISQNMV

SEQ ID NO: 68786 - protein, 252 aa, Zea Mays
MGYLPQAMVNYLALLGWGDGTENEFFTIDDLVQKFTINRVNKSGAVFDATKLKWMNGQHLRSFPHDELIKAFEDRWTDTGILQESESGFAKEAAELLKDGIDLITDADAALTNLLSYPLHTTLSSEEAKPVVQDKISEVAWSLISAYDSGELGQALAEGRDGWQKWVKGFGKSIKRKGKGLFMPLRVLLTGKLHGPDMGGSIALIHKAGVCCAVTPQSNFVTLDERFRMLKDVDWESLAKEQETPAVPAAAS

SEQ ID NO: 68787 - protein, 91 aa, Zea Mays
MNTTKVMLRVLVFSLVFTMLSTHQALGNKENCDKDKDFIKRQCESITLEEQLTISVMKVVDVAKECGNPVPPGNKCGTWTVPPQLLARVHP

SEQ ID NO: 68788 - protein, 194 aa, Zea Mays
MAEAGRRTLALVNLAAIMERADEALLPAVYREVGAALGATPVALGALTLYRSAVQAACYPLAAYAAVRYNRAHVVAVGAVLWAAATFLVAVSDTFAQVAIARCLNGIGLALVTPAIQSLVADCSDDNTRGAAFGWLQLTGNIGSIIGGLFSLMLAPTTVMGIAGWRVAFHIVAVISVVVGVLVGLSFVSALVLH

SEQ ID NO: 68789 - protein, 261 aa, Zea Mays
MDGTLQPAVGSDGRKVEAQGNVLLASIENMQYAVSVDVLHTVFSSFGTVQKIAIFEKNGGTQALIQYPDVNTAAVAKEALEGHCIYDGGYCKLHLSYSRHTDLNVKAHGDKSRDYTIPAGVIQGAPQPPGIQATSPGWQGNLQAAGPYAPPGAPPQNHSANGQVPNWTPGNSGYSPAPGTYPGQMYSSPAHMQHQGASLTPHLPPLLVLHHKRRTLPSRCRISMEIIQEEARPELANRHCQHHITVKLDLLLLLYLTCVLN

SEQ ID NO: 68790 - protein, 232 aa, Zea Mays
MDFHLLLLGGFYSFCTKLLCPTLLNGSGFRGRVHALWQWVLQKWPSMLPYAQDFIQLAIRTNLMFFYFEGLYYHLPKRAAGIRYVFIGKPMNQRPRYQILGIFLLIQLCILGAERLRRSNISSIASSINQISSGGYPSTTGRGIPVLNEDGNIISDIRSGKAADIASHSETSNGKSKCTLCLSIRQNPTATTCGHVFCWNCIMEWCNEKPECPLCRTPITHSSLICIYHSDF

SEQ ID NO: 68791 - protein, 275 aa, Zea Mays
MPNLAFTIANKIFTLTPEQYIVKLEQAGQTICISGFMAFDVPPPCGPLCYAKHICTTLKCAMRASTEGITVPPLAPPRPRLSVSAPFVSPQWPRPYLMSTTTTRVNMKKSSGSGSVSLARSIPELYEERGASSLREFGFQELRAATSDFSRLLKVGEVALGAFTRASSAFLAGPPAARSSRLSHSGISHLPADEVKPLVKYDNDEDAHSPSGRGRGRGGRGRGRGRGRGGRGNGFNEYVDAGWEDDHAPAYMGNGYARGRGRSFRGRGRRGDDDN

SEQ ID NO: 68792 - protein, 166 aa, Zea Mays
MDDASIGGHWWPLTPPQTSPSLRRQRRFGQRPPTGSQVLLTVRHRVEPDITTMTMRHRRSSRSHFCCPLPTPVNFVCLHAVKPHLRPLAMAVSTVSIHIFGDVPSSPLVGLLQDKINNWRETSLILTSILFAAVVFWFIGWLKGYHKWYLEARRQPHFHMLGCCWL

SEQ ID NO: 68793 - protein, 847 aa, Zea Mays
MASLLSSPDDSKSLSVTTSSLFLSSIASLPSSHAFSIFTSASTPLPPVPVSVPPAALIPGSRFLVDAFRHAGNFSVAYFLSHFHSDHYSGLGPSWRRGLVFCSAPTARLVSSVLSVPPQLVVSLDIGVRITVDGWGVTAVDANHCPGAVQFLFASPGPRAERYVHTGDFRYTESMTRDPNLLEFVRADAVFLDTTYCNPKFTFPSQEDSVDYIVNAIKRVKEESSVSGERVLCLIATYAVGKEKILLEVAQRCGCSIHVDSRKMKILTLLGFGGKNSVFTEDATGTDVHVLGWNLLGETSPYFQPNFVKLKEIMMERGYAKAVGFVPTGWMYETKKEGFAVRVKDSLEIHLVPYSEHSSYNELRDYVKFLHPKSVIPTAGVDAGKLDSKEAVALQKHFAGLVDETANKQEFLMAFHRRSIDATRSCKDVVVNCSSQLDGEDAALLPAISSASEQQDKLMENTMQETLKELSDFLPSWVSQEQITDLLMSSEGDVVKAASIFFERERDFFEEANVSCNGTPKTEKNHSSNHGSSADVSSQQESSLFSQKPVEYSAKLVNLSPMRMKPNTPKKVNKRGSSNTNKPKKKGRLTSSTESGGRKQSTITNYFIRATEAAFKRCRPERVTVEAHQNNVENSDQLADTEKTQDQIVDQLLQIVDGSMSREYAVYLLEKANGDVAVAVDIFYSSSEGNNVIEVDKNIMLQNAQGETADNCSETDMASGYSQATPKMSNLHVGTSLAHGDSANTSLLIEKYLPIEHACWIAGQPAPYLHLARTFDLVEKEKGKIKTIAIFCNMFRSLLALSPDDVLPAVYLCTNKISPDHENMLGTEHWWESSCNYSGGIIRNQQI

SEQ ID NO: 68794 - protein, 581 aa, Zea Mays
MSPCLTCLFDKLPAVLRIYRDTLITVMKASIKTTVGELLPVLTARPIDSDSVTGDRATDADAGGQSLANKLRSLSSEGFVQLLSAIFRIVQVHLQQAAEVKRIVEWVMGNLDGTLGVDASNPTLQHGGTVIPDTQENDSSRGSNTLTRSTSKIPFVQGKTNDFSIINSLKNVRADVLRENTEAVFAACDAAHGRWAKLLGVRSALHPRLRLQEFLIIYNITEEFIAATEKIGGRLGYNIRGILHQQSKQFVDYQHNVRMTKIKAVLDQETWVAVDVPEEFQAIVLSLSSTYSSVNGMEMPSTDDNSKFSDHRSTSQEPTYSAKNIADNGKVTSGTGENKVEFTSQTENNVAGNLKSTLQTIVHGGVGYHMVNCGLILLKMLSEYVDISKCLPSLSLEVVQRVVEILKLFNTRTCQLVLGAGAMQVSGLKSITSKHLALASQIISFMHSLIPDIRRVLFLKIPEARKHLLMSELDRVAQDYKIHRDEIHNKLVQIMRERLLANLRKLPQIVEGWNGPEDNDVQPSQFAKAVTKEVTYLHRILSQTLLEVEVQTIFRQVVQIFHSHITEAFSKLEVNTPSGKE

SEQ ID NO: 68795 - protein, 72 aa, Zea Mays
MESAPQTPTMAAAGDVLRVADLPGRGRGLVAARNVREGTYVTMRVVGVCLLHCHPHQTATCPMCLNAISVGS

SEQ ID NO: 68796 - protein, 105 aa, Zea Mays
MDFLSTENSFSPDRVTKAVEKIKVARDRYSPGRMKHLTPVASLRGSHTEKEPQCILGSPGQTLKVMSSPQVCKSPSSGFRYGSSKPFMLGRQSGFHGMPYALSFI

SEQ ID NO: 68797 - protein, 492 aa, Zea Mays
MGCRSSRLDAADVSPAAALCRERRDLLRAAADHRARLAAAHAAYFRALPRVADALARFASHHHAATPPGSPVLTLPPPSDHADADADAEPKKQRSGSASGSATPHTGSGHSHIHFHSDDSSESDPDSSTDPCAGPGGCGAGHVDGDGDGDGEVPRPAPALRPGVPLPGRGGHGEPQERQIQDPAFARPEMPWEYASYDPYPSFPNTEFQNATFPRYYYMKASSTPANTVYQEPYGYGNFATSSSYMGYNNPMYGVPLQPDGDRPVEDRGRESVAPPPAAPPPMPMPETSPWDFFNPFDSYEQELPQYRGKGYDSNGSFTSSPNSSEVRAREGIPELEEETELESMRESVKARKAVESTASNRIDNADVSAKVKVSMEHKEVEIESVYSVSVLESGDESVCSCDCDHANTRTEGPMQVPAGDDQGGKVSSEDHSSIVVGEDVWPPEITGTRDVAVVVEEIKEQFKSVAACGDDVARILEVGRMQYRSRNRVLR

SEQ ID NO: 68798 - protein, 365 aa, Zea Mays
MDRKPAGKNSFRQQEKQKKNERLDWNDLVLAGPFVLHSHSQTAPSLYTAVSSRARGVRVPPLGGAGQKSLLDGWLRKPDASQVRRLIFTWVPMVRFHSANHLPAFSQYSLLEPMEVQLATEQPGDPFLPLRWESTGDQWWYATPIDWAAANGHYDLVRELLRLDPNLLVKLTSLRRIRRLESVWDDDARLDAAARNRAAVARRLLLDCEPDNDKQPPSRGGGGDAANRLLRAGYGGWLLYTAAAAGDERFARELLAAQPLLVFGEGEYGVTDILYAGARSGRPEVFRLLFDAVLSAAPACPVGGDDGEFRREMMNRAVHAAARGGSLAVLRDLLRGCSDAAAYRDAQGSTILHAAAAKGQVERTV

SEQ ID NO: 68799 - protein, 806 aa, Zea Mays
MEAHGDQRWLVDCLTATLDTARDVRAFAEESLRQASLLPGYGAALTKVTINKEISFGLRQLAAVLLKQFIKQHWQEDEENFVPPVVSASEKVVIRQLLLTSLDDSNGKIRTAISMAVAAIGQQDWPEDWPELLPVLLKLIGDQSNGNEVRGALRCLALLSDDLDDMCVPKLVPELFPSLYRIISSPHLYENSLRAKAFAIVHSCISMLGSMSGVYKRDTASLMTSVLDPLIEQFSIVLNYPVQSQNPDDWSMQMEVLKCLLQLVQNFPRLPEAKISAILPALWQTFVSSFKTYHLSYIQGAETLDSISYDSDGSEKSLESFEIQLFELWTTIVGNSRLAKVIGGNIKELAYYTIALQQITEEQVQNWSRDANQYVADEDDLTYSCRVSGSLLLEELVTAYEDYGIDSIVEASQMRFHESRELKEAGSADWWRLHEASLFALGSLSEQLCEAQDSGLTKYNVRDLLEQMLIDIMGTGVHQYPFLHARAFSSVAKFSSLISKGVSEQYLCNAAHAIASDVPPPVKVGACRALAQLLPESNQNLIQPNIMGILSSLVDLLRQASDETLHLVLETLQSAIKSGGEQSTLIEPVISPIILDVWAQHIADPFISIDAVEVLEAIKNAPGCLQPLVSRILPTIGSILVKPKVQPDGLVAGSLDLLTMVLKNAPVAVVKAVFDTCFVSTVQIVLESDDHGEMQNATECLAAFISGGRQELLVWGGEQGQTLKMLLDAASRLLDPALESSVSLFVGSFVLQLILQIPLHLSPHIPDLIAAIMRRMQTSSIAGLKSSLIVIIARLVSLSLSYLRYI

SEQ ID NO: 68800 - protein, 659 aa, Zea Mays
MEKISVAVRFRPPNLVAANTSPASSGGGGDREWRIDDTRVSLLHRAAGPITGASFAFDHVFDGAANNERIYGTVVRELIGAVVGGFNGTAFAYGQTSSGKTFTMNGSDADPGIIPRAVRDVFDTVRQADDREFLIRVSYMEIYNEEINDLLTLEGQKLKIHESLDRGVYVSGLREEIVNSAEQVFELLQLGEANRHFGETNMNMRSSRSHTIFRMVIESSGKDQTDGGDAIRVSVLNLVDLAGSERIIKTGAEGVRLNEGKYINKSLMILGNVINKLSENGKQRGHIPYRDSKLTRILQPALGGNAKTSIICTAAPEEIHIEETRGTLQFASRAKCVSNCAQVNERQKLEIEELRKKLQGSHSEGLEQVVLKLRNDMHKSELERDRLAMELEDERKLRMTLEQHLTEQQKLEAISSDHFTDSIQLDLLKTPDSKSVPDGFVACRSRYSQDVEFSPIPENLDNIAEEDLWTRLNKGCVTDLDMLEMTPNLKRESSFLQEKSSAAPLEEPTNAICQRLAKECIYDQQQLEESKARCANLEKDCDVLRDENLSLQQELSESKLEADSLVAEKQAQLDDLRMRCVALERDLSSSRQEAHRLATEKQELAGQLGTERQKMDELKQDIRVICGDLLQREGQLTSIYTKSKAIIESCKASQVATLL

SEQ ID NO: 68801 - protein, 325 aa, Zea Mays
MSILEGSGSFSVPLWEKKFCTDACAIPWAKLCETKRLMSLYKSVVDWDDSAALEAFNDAKARFCAVYHGQCYDIPLPDPNMFIDIINPDEYVDPELVADLEKSRRSVPRKDNGVPDVWDSFIFSDKPVPVTGWGDTETSFTHGQQLSVNWDNQLEHSVEANHKQMSASWDYSVKQPSQRIGQQNSGNWEVYKEQQDQASNWGEQTNPCSTNWVMDGSQDAWKHGYGWGPAAIQTDPWDNCQYSYQVPDSQGTYGHWTHWRRRNNDLGRRNTRNRGDPISSKPMKSKYQTDEHSGANNGWRNCRVKNDMYYYSYEQADYTKQSLAM

SEQ ID NO: 68802 - protein, 456 aa, Zea Mays
MNVDEEVESGEEEEEDLFYESLDRILSSSGSSTSASDDDGADSPRRRRGCDAPVAAAAAALDLWTSQPSPVQERRRRLLQLMGLIGDPSLAGFETGRSASEDAAGPPPASPVSRSRSGGAALGSAGKPPLGGVRLRSSLSDGPDPADEDPRCLIRNLDDGREYVVKEEFGLREVGTGRHLTVEELARSPIVQELMRRQAFSTPNSNCNSNSQSGASTPIERSSSGSSNGGSRSKRRSSWLRSIRCAAGSLVTHSRDRSSSDEKDTSSEKGGHHSSSATDDSQDSVPRHGPARVKVRQYGKSYKELSGLFMTQEIHAHNGSIWSIKFSPDGRYLASAGEDCIIHVWEVLEFKRAGKEREVKENGVCNPLVAMVYSESSETMVASGAPSGSHWEKKLRSKVLQGGGSVSSDRLMVPEYVFALSEKPVITFAGHSEDVLDLSWSKSQSPLNLHVSHKNR

SEQ ID NO: 68803 - protein, 66 aa, Zea Mays
MDIHRSTYARTQPAYVHTYACGSHVRAVYPSSDGRPCGAGPPPPGTCPSTKVRTCESVRRRRGSAR

SEQ ID NO: 68804 - protein, 561 aa, Zea Mays
MGESQSSEDASRFRALGNGVSGAGQGSAGDNELHDGSIASQAVRAYPNGGRSLVSDVGLFDTLRVGSNQYFGFSHSASGNPYDEQSLSFAFEGMGFDSRKTNSPTSHHNVPLTNGHYPSERVDGTLSQQHAPATRQCDSLGLQFSVQHAMQNNDVEHQEQSPRFPPQLGTFSRNPELHSFDRNFGVPCHPSIASASSLKMWQSQMYTPHDQNVGSNFMWQQNTGVQPYSIMQPNYACPQMQQVSGFGISRHRSNEQAAVYPPAKGPSSSYIGTPNFHWLENGYSYLNGAASQKRRNSGGLNNTFADSFPSTSYTGSSCGSGDFHHFQWAEKVFNSYGPHHQQGDNLSHPYGLGLSHHQRSDIAHPYGLGFSHHQRSDKLNTASYVERIRMRPDVGNSVNFFDLSSYARLLNSPFLSSQSDTYKSIDEVMGRVCMLSKDQDACRFLQKLLSEGTQEDIDKIFGEIIDNVGDLMVDPTAHYLVQKILEECTNDQRTHMIREITKAPIKLHKASCNVHGYEHNNLYYFIIPICWVFFKKGRRDAVLRAVLLSDQVVGSKHLSLL

SEQ ID NO: 68805 - protein, 195 aa, Zea Mays
MMHEGAIKRPFPYNPQLPLWPYPVSPFAVKVLDSPLPALKRRYLGASSSPPPPSRALPSVGAHRHLAVLYRVALYRAAVPPPRLLAVNKHDLLAHIASFDYRPGMMAELDAQMGFVVGGTILMLLTVVFFEIQVSLFSFPESGVLIAACTNPFKLRETGCLTGCQATSGRYPSHFDFKVLIYALHVHINVFWYFY

SEQ ID NO: 68806 - protein, 245 aa, Zea Mays
MTERQVAELGPGTACCGWNHCGRRLAAGAVDGSVSVYDSQPPPSFKWQAHEQAIVNVVWLPPEYGDAIACVCADGTLSLWEEVAADDQLPTWRNCKIFEDGNSHILNVHFGLHLGILKMVTAYSDGQVKVYELLDSLELDKWQLQAEFQNITDPISRFGKPACTSASIAWNPRRGGSQQASFAIGFNSDSPHFNSCKIWEFEEAHQRWLPLVELGSPEDTGDKVCAVAWAPNIGRCGNWNGTWAV

SEQ ID NO: 68807 - protein, 119 aa, Zea Mays
MDKAPQSDMERRLVEQLREGKFAKNAPVQSGRRGCYYTSIPASVKHKDISGGDLTALNLDKTSLLETILAKNYEGQEDLFLGELQFAFIAFMMGQSLEAFMQWKALVSLLLSCSDAVLC

SEQ ID NO: 68808 - protein, 63 aa, Zea Mays
MAGGPDVAGLIEDDAVSVITEGLVVCDICGSGSAPHLIANCARCNAREHGLQVLEMVLGAKFP

SEQ ID NO: 68809 - protein, 190 aa, Zea Mays
MGGGDDRRAAALQRSSSPWSVGERWRAHAGMVLVMLAYSGYHVLAKSVLNVGMNQVVFCVYRDLLALLVVAPVAFLRERRVRPPVTPQLLASFALLGFTGLYGNPLLCLVGLRYTNASYAAAFQPSIPVLTFLLAAIVGVIGGVSIIAGLYLVIWARYNQGQRAPTDGCLDPLIIVDNPRIHKTQESPFV

SEQ ID NO: 68810 - protein, 649 aa, Zea Mays
MATAAAMADDDDFASPPLAPRAREEGGGRGVYQVGGVPVEFPYKPYGTQLAFMGRVIATLDRARRQGRSHALLESPTGTGKSLSLLCSALAWQRHYPLRSPPAPDPLLHGGGFVPDDTQPQPTPVVPEKAVKKKNAPIIYYATRTHAQISQVVREYRKTSYRVRMAILASRKHYCVNKFACASDNIDEKWNAQKLSRHPSLQIGGCYEVHDIEDLVRVGQKAKGCPYFAAQHMAEAAQLVFCPYNYLISPVVRRAMDIDISGSIIILDEAHNIEDIARDAGSIDIDEESLCLLQGELQNLAANEAVAMIYQPLHDIIQALIGWIAEREDNLHNHEFGHPASYWTGEKAMNELQRAGISPMYFPVLQECATKAIKAASDTESDGSHLSGGSAMTLESLFSSLSYFFAQKGRNSCDYQLALQRFVKKEGKDVISSTCTMSLWCLNPAVVFQEIADRTLSVILTSGTLSPMGSFTSELGVQFEACMEAPHVINADSQVFAAVLSSGPTRQILNASYKTADNSSFQDELGASLEEICRIVPGGALVFFPSYKLMDKLQVRWSQTGQWARLNAQKHVFVEPKGSSEELDPVLKGYYDAILGKAPVKKGRGGSKQIAKNRVTKKSSQESVKAGAALLAVCRGKVSEGIDFADDNA

SEQ ID NO: 68811 - protein, 84 aa, Zea Mays
MPPGSPSSPTDPTSSKVVPPPSYCSHGSPAIILSFLYCLLPPDREAALVQVLPGEVEPNRIPWRTTLQWIQDVRHQINGEKQES

SEQ ID NO: 68812 - protein, 512 aa, Zea Mays
MEEAAAAAAAWASNAATPVPSEPMRSPPDAEASVDPTAVGDDEHDSKEVVLRRYFLQEWELVSAILHRVVAGGGVAESADVHRIRSIMDKYQEEGQLLEPYLENIVSPLMSLVRSKTMELGASTDELLDIIKPLCIIIYTLVTVCGYKSVIRFFPHQVSDLELAVALLEKCHTMSSATALRQESTGEMETKCVVLLWLYILVLIPFDISTVDTSIATADNVDGPEVVPLVTRILDICKDYLSSSGPMRRMSGLLLARLLTRPDMAKAFSSFMDWAHKMLLSVSDDFVDQFRSIGIVEALASIFKIGNRRALHDAVSGTWSDCSLVMKTNVSARSPLLRKFLVKLAQRVGLISLPPRLPSWQYKSISSSLGANLSSYTAGEVYSSGSREQVNIDQIGMCFLEEDMDVPEIAEEIIDLLLTGLRDSDTIVRWSAAKGIGRITACLTPALSEDVLSSILQLFSPGEGDGSWHGGCLALAELARRGLLLPSSFPDVVPVIIKEWQHVMAKEIAALE

SEQ ID NO: 68813 - protein, 101 aa, Zea Mays
MHHAAHLDPSASPPPARACQQPTGRPRVIAPPPCLALGTNLNVVSLACGPCGRTSKLSGPHAPVLVSKTSDGHACALDNLTGSVRLPQGHRINHLQPEPRD

SEQ ID NO: 68814 - protein, 233 aa, Zea Mays
MKFVEKIAECNPKNYQIWHHKRWLAEKLGPGIANKEHEFTMKILAIDAKNYHAWSHRQWVLQALGGWETELEYCDHLLKEDVFNNSAWNQRYFVITRSPFLGGLAAMRDSEVDYTIEAILANAQNESPWRYLKGLYKGENNLLVEDERISAVCFKVLKNDWTCVFALSLLLDLLCTGLQPSDELRSTLETIRSSHPETADDDPAAAVCCILQKCDPLRVNYWSWFKDTLSQIS

SEQ ID NO: 68815 - protein, 446 aa, Zea Mays
MWRPCSDQRDWKASEGTNGYIMISANGGINQQRVAICNAVTISRLLNATLVLPKFLYSNVWLDKSQFGDIYQEDYFIKYLKSDIQIVKDLPVELQSLDLEAIGSLVNDTNVMKEAKPSLYVKKILPILLRNRVVHFIGFGNRLSFDPIPSDLQRLRCRCNFHALRFVHKIQETGAVLVERLHGHRASSSPLKDNLLGQFAIKSDPSTNKSDASKYLAVHLRFEIDMVAYSLCYFGGGKDEEDELEAYRQIHFPVLSELKKTTKLPSAALLRSEGKCPLAPEEAVLMLAAIGFKRSTNIYIAGAEIYGGQYRMAAISRLYPALVTKETLLSPSELEPFRNFSSQLAALDFIACAAADAFAMTDPGSQFSSLVQGYRMYYGGGNFPTIRPNKRRLASILVKNATIEWNEFESRVRKLIQQTKQVHERPVARSIFRHPRCPECMCRTEH

SEQ ID NO: 68816 - protein, 124 aa, Zea Mays
MRYKLKKKYFNGVPANQVRTTSPISFMIDDQWKLLMEMWSTSKHKDTCMKNKVSCEQVKFPQGTGSQSYIAKAYSMVDMESMAAAPVEDGHHVKSSIEQRCSNLSLNYKLRGKKKMDYEMKSKA

SEQ ID NO: 68817 - protein, 242 aa, Zea Mays
MNMKEDDGVSEVKSSLQSAFAKLMTASKDMVSEAVAKLISRLNTKSKIRTLTDKEQLVLSLERQYQDDVGVIAALFFNYVKLSPGEALYIGANEPHAYLSGECIECMATSDNVVRAGLTPKYRDVQTLCSMLTYKQGFPEILRGVPVQPHVRRYTPPFNEFEVDWCLVPPGGLVVISPVPGPSIFLVITGEGEIQLDFMSDGEKAEEGDVFFVPAYTEVKISACGPESVQLYRAGVNSRFFS

SEQ ID NO: 68818 - protein, 835 aa, Zea Mays
MATQPPSTATAAVDLYETASQPDAPAAGDAYTFLEFNTQGDDFDYPDFPELSQPPPRSTPLTSSIPGAGTSSSSWPAPPPPPSDAASPEPDLTSQDVHTPPASSSSPSPRSASKARPSAAADGLASGVVALNFEDPVGTGAVEDGYDYSKGDFVEHACRYCGIHNPACVARCNVPSCRKWFCNSRGNTSGSHIVNHLVRAKHKEVCLHKDSPLGETILECYNCGCRNVPSEQEQLRARQISAQQINKVEELWKTNPDASLEDLEKPGVDDEPQPVVLKYEDAYQYQNVFAPLIKLEADYDKMMKESQSKDNVTVRWDIGLNKKRVAYFVFPKEDNELRLVPGDELRLRYPGDSSHPTWQSVGHVIKLTAQEEVALELRASQGVPTELNVGFSVDFVWKSTSFDRMQGAMKTFAVDETSVSGYIYHHLLGHEVEHQIIRNTLPRRFGAPGLPELNASQVLAVKSVLQKPVSLIQGPPGTGKTVTSAAIVYHMAKQGQGQVLVCAPSNVAVDQLAEKISSTGLKVVRLCAKSREAVSSPVEHLTLHYQVRHLDTSEKSELHKLQQLKDEQGELSSSDEKKYKALKRATEREILQSADVICCTCVGAGDPRLSNFRFRQVLIDESTQATEPECLIPLVLGVKQVVLVGDHCQLGPVIMCKKAARAGLAQSLFERLVILGVKPFRLQVQYRMHPCLSEFPSNCFYEGTLQNGVTVNERQSSGIDFPWPVPNRPMFFYVQMGQEEISASGTSYLNRTEAANVEKIVTTFLRSGVVPSQIGVITPYEGQRAYIVNYMARNGSLRQQLYKEIEVASVDSFQGREKDYIILSCVRSNEHQLRV

SEQ ID NO: 68819 - protein, 278 aa, Zea Mays
MIDDTVDSIVSDMLLWPHRHVVKLGVNVDTSDLELKPQGRLSVTVVKATSLRNKEMIGKSDPYVKLYVRPMFKVKTKVIDDDLNPEWNETFDLIVEDKETQSVIFEVYDEDKLQQDKRLGVAKLAVNTLESEITQDATLKLLHSLDPIKNKDTKDRGTLHLKVKYHPFTKEEQLEALEMEKQAIEERKRLKEAGIIGSTMDAVGSGVGFVGTGIGAGLGFVGSGIGAGAGLVTSGIGAVSSGLGKAGKFMGRTVTGPFSMSRKNGSSSTAPQHDQPSA

SEQ ID NO: 68820 - protein, 542 aa, Zea Mays
MEMEPEQEAELPMPEQGGDNSGKAPAEEDEEKPPQLELEDEPNEVDGEEDDPEAAKRKAPSKKRKLPPLFSPGARYHWKLCGANSGYHYIPCVDFDGDGRQRHHERSCQRSPVTCLVSLPKEYKQPAPWPERKDKVWYGNVGHPRLSNYVKGHNWLNHSGEYLMFPPDEWEFKGSARHYVESIDEMAPDIDWGKNIRIILDVGCKSAGFVGSLGSRRLPFPSGAFDAIHCGECNIPWHSNGGKLLLEINRILRPGGYFIISSRSADLESEEGISASMTALCWNAIAYNSDDVSEAGVKIFQRPVSNEVYDLRAKKDPPFCKEEQNKASAWYTNIKHCLHKAPVGIEERGSDWPEEWPKRLESFPEWLGETETRVASDHNHWKAVVEKSYLDGLGIDWSNIRNIMDMRAVYGGFAAALASKKVWVMNVVPVHAADTLPIIYERGLIGVYHDWCEPFSTYPRSYDLLHADHLFSRLKIRCKQPVSIVVEMDRILRPGGWAIIRDKLEILDPLETILKSLHWEIVMTFRKDKEGIMSVKKTTWRP

SEQ ID NO: 68821 - protein, 600 aa, Zea Mays
MKKETMEGHVPLPLPLLPDGETAVGYSKDDASSPLQEEISSLRSRQRRVDRRRREALDRLVELKGSVRVFCRVRPLAHTNSLHAQSSPVTVEQERITVKQPGSRGSSALIGFSARSPRKEGTGGNKLGVVPRAIQELFSRASEDGSCAYSFSMSMLEVYLGSLRDLLAAPRQPLFRRTECKAAACSSSLSILATKGGAVEVEGLTDVSTPDLKNASQWYRRGRRARSTAWTNVNDASSRSHCLTRITIRRRMRHGGGGGVSKLWLVDLGGSERLLKTGASGLTMDEGKAINLSLSALGDVIAALRRKRPHVPYRNSKLTQILSDSLGDGSKVVMVVHVSLSEDDVGETVCSLNLAKRARSIEPNREIPQKRVAELDREIRAAEEELKRLDEQIRRAEEKEISLEEEEEEEEEKKLFASSVCQALSDDEKGSPRSTLVVVGHTDAAESPRATTEKAKGRRPPPARGHGGSAAPHFMSSTVCSRQRRCAGGYHSVGNGKPRLTAVSVNRYPPPAAELSGSQNAAARASRSASVALSSGVHKLRCLRVNKSDQVNVISNSSVDSTAASAPPPRRRESCFGSRPVLQRAAAPLHLHRRRMSSLT

SEQ ID NO: 68822 - protein, 686 aa, Zea Mays
MASGAARKRRRKSSPPAAAAAARDGRKLLVGEVVEVSAIRAVVCDEVHRIAAKGDGPRVMGRVLSCDQGLRGSWHKAIVIGILENARAVRYTDFIDENGSPLVENVQVSDAIDGKSSMPEELIRGNIRPMCPHQALQVSHASYGLCVDALIESSYWEGVIADHAEGSMERKVLFPDEGDECIIEVDQLRLTQDWDEATGEWKPRGIWSFLQILLSHEERDGLPVSIRQIWFDLRSKPSFKTDAKMWMCGTEDFWERSLADVIAELWSLCDKPTLDGYQVEAVQKDTVETTVLDRLDPFQALSEYISCYRNNRKNALIKKEWAKQHLKSSGWTFLDDRPKNKFYISPDGKRFPSFLGACQACLAAKEANGYQYDHTENLHLDSMSLVHKNACYNQTHMDLALVKNKSNDKWITSPSRSWELVQLDAEFSPQIVSLLASYQDGTTVLQRTIDRTLSVKLKKHLLALGWSIKFKKDEIQENGHHKHTTRYRYESPYGKTYVSIIQVICSLIVGGVKQDDRPSYRTAAKGAHLTVSTGLARLNKRKRRDKTDALEKYIDYMKTDKQNSRRRKLLRSNAQKFLKSAGWNFWLKKKSRNKLELRYGAPHGKSYSSLVAACKGYLENGYQEDSDADIKIANHGSADGSMRPSKLIALSGGLKDSSKIQDLSLSASREDSFVFVGREKYCGTKG

SEQ ID NO: 68823 - protein, 634 aa, Zea Mays
MQSDVVANAREEINKLRHTNEDLTKQVEGLQMNRFSEVEELVYLRWVNACLRFELRNYQTPSGKVSARDLNRTLSPKSQERAKQLMLEYAGSERGQGDTDLESVVSSMPSSPGSEDFDNMSIDSSSSRYSFLSKRSNLMQKFKRWGRSKDDSSSLASSISGSPRRKPKGPLEALMLKNAGDGTAITTYGKRDPNDVLDDENVASSFQLMSKTVEGFADEKYPAYKDRHKLATEREKAIKEKAGQARAQRFGGGHSSALISSPKGALPPKLAQIKERSPAANAESSEQSSDNQNNTLVVSQMKLANVEKRATRVPRPPPPRSTAASGATSIASGVQTPRAPGAPPPPPPPPGKVGGPPPPPPPPGALPRNLGGGDKVHRAPEIVEFYQSLMKREAKRETSLGSISSNVSDARSNMIGEIENRSTFLLAVKADVETQGEFVESLANEVRAASFINIDDVVAFVNWLDEELSFLVDERAVLKHFDWPESKTDAIREAAFEYQDLIKLQNRVSTFTDDPQLACEEALKKMYSLLEKVEQSVYALLRTRDMTVSRYKEYGIPFDWLSDSGVVGKIKVASVQLANKYMKRVASELDALEGTEKEPNREFLLLQGVRFAFRVHQVKSSHLYIQNPGTLQVN

SEQ ID NO: 68824 - protein, 1212 aa, Zea Mays
MSSPSDATEITDRIASHRNALKIYSFFLISIVLTAEAGAESCTAAKATAHGRKKNHIYSWNWEAQRGRIMSLVANSLEANLSLLFGPGGTDERYLSFVSKCTFVLCENQNVLKDEDTRNGLCRIIGAIATKHQRISQISASVSHLIHKFDFTVPHLAEAVASAEKKFGDGSLAISLIREIGRADPKEYTRDSVGADNVGRFLVELADRLPKLMSTNIGVLIPHFGGESYKIRNALVGVLGKLAAKAFKDVEGDSNARLRSKQAMLEILIERCRDVSAYTRSRVLQVWSELCEENSISIGLWNEVASVASGRLEDKSAIVRKSALQLLITMLQHNPFGPQLRTATFEATLEKYKEKLQGMEPSNSDKDEAANDSSPGEVIMGQDESVSDSCLASSQDQNDRDATIVDITNLEQIRALVASLEAGLRFSKCITSLMPILVQLLASSSATDVENTILLLMRCRQFQIEGSEAALRKMLPLVSALWDYFCFNINGVRPVQSRGALSILCMAAKSSPSILGNHLQDIIDIGFGRWAKEEPLLARTACLALQRLSEEDKDKLISNNSRVFAALQGLVTSFSIPEKIWYGAADKAISTIYTLHPAPELFATETAKKSLSSVFSVLGTNDVSNGDEAQNGASLSSVSPSKLGRFLFVISHIALNHLVYIENSVRKIQKQKRKNEKSQPTTEDLQPDVSKSLEAQGINAELGLSATIDIAIESLAERAEKEIVCCSSEKNLIGHCGPFLSKLCRNLALLQKFPDLQASAMLALCRLMIIDAEFCEANLQILFTVAESAPSETVRSNCTIALGDLAVRFPNLLDPWTEYIYARLRDPSVSVRKNAVLVISHLILNDMMKVKGYINEMAVRIEDKDERISSLAKLFFHELSKKGSNPIYNLLPDILGRLCNQHLKEETFCNIMQFLINSIKKDKQMEALVDKLCNRFAGVNDVRQWEYISYCLSQLTFTEKGLKKLIDNFKMFEHALSEDSVMNHFRSVISKCKKFAKPELKICIEEFEEKLSKVHQEKKEQEETTKNAEAHRQRIDSLDEFLVTKEVSENSGNSAEDETSEVVDPSVDSSTEHMENTPECSVNTSAENSQTTAPLTESEGGGEEIQSAQPVSKGMSRLRAKKTRDPVVDPSVDRSTEYKGNTPEHSADTSTENSQTSVPLTGTEGGSEEIQSTQPVGKGVSRSRARKTRDPVVEDSAAPVRRATRSTRRQGS

SEQ ID NO: 68825 - protein, 91 aa, Zea Mays
MRRSAQLRLKARPDESEARADGRLQNDTLGLACIRRARVEKGVRLGLSMATHDPRSQPKSPGAGKKRSAAPLSAHIKELFREPICRLRSGT

SEQ ID NO: 68826 - protein, 144 aa, Zea Mays
MESSRSRKRTRQAHDCAAAPPPEREVVARGGASPPWREDDRDGHFVFDLGENLTRRYKILSKMGEGTFGRVLECWDRETHEYVAIKVVRSIRKYRDAAMIEIDVLNRLAENEKYRSLCVQIQRWFDYRNHICIICMSCGLSTLI

SEQ ID NO: 68827 - protein, 399 aa, Zea Mays
MRNTMIDLAPAKTNPLPDKKYSTLVSLSGHLFDKFLINEALDIIETAGGSFHLVRCEVGQSTDDMSYSELEVGADDTATLDKIIDSLTSLANEHGGDHDAGQEIELALKIGKVNEYETDVTIDKGGPKILILGAGRVCRPAAEFLASYPDICTYGVDDHDADQIHVIVASLYQKDAEETVDGIENTTATQLDVADIGSLSDLVSQVEVVISLLPASFHAAIAGVCIELKKHMVTASYVDESMSNLSQAAKDAGVTILCEMGLDPGIDHLMSMKMIDEAHARKGKIKAFTSYCGGLPSPAAANNPLAYKFSWNPAGALRSGKNPAVYKFLGETIHVDGHNLYESAKRLRLRELPAFALEHLPNRNSLIYGDLYGISKEASTIYRATLRYEGKQLHTFLLQ

SEQ ID NO: 68828 - protein, 242 aa, Zea Mays
MEGYRNKSRFLYGESMGGAVALLLHRKDPTFWDGAVLVAPMCKISEKVKPHPVVVTLLTQVEEIIPKWKIVPTKDVIDSAFKDPVKREKIRKNTLIYQDKPRLKTALELLRTSMDVEDSLSEVRMPFLVLHGEADAVTDPEVSRALYERAASADKTMKLYPGMWHGLTAGEPDDNVELVFSDIVSWLDKRSRHWEPDERVRRAPPEPENKRRVTSSSSQRPGSFLCGLGCRCRQHQQQCSRM

SEQ ID NO: 68829 - protein, 318 aa, Zea Mays
MGGGSGSFLKVLVNNMDVLAGPLVSLAYPLYASVRAIETKSAVDDQQWLTYWVLYSFITLFELTFAPVLEWLPFWSYAKLFFNCWLVLPQFNGAAHVYEHFVRPMIVNQQVVNIWYIPKKDESSRPDDVISAAQSGHLMTRAGRAIQVQYVLMATVMYHAVALDLPKWAIKAIDKIRHGFLWKGRKDVLGGHCLVAWGKVTRTKELGGLGISDLQKLNWALRVRWLWLEKTDPSKSWADLPLQSSSMLKSILSTTMITEVGDGRNTLFWRDRWLMGQRIEDLAPHIFALVPTRIANRRTVAEGLVEMAWIRDLRGTIT

SEQ ID NO: 68830 - protein, 73 aa, Zea Mays
MTAHLAGVPSSSSVSNATFVLLLQSLLTRVISTDFRKECGHLRSHPLLRRAHAYGVPQSDILFIHLQAYLAYG

SEQ ID NO: 68831 - protein, 258 aa, Zea Mays
MDVGAELREAHRLTGHADRVWALAWNPAPGPGSSPVLASCSGDKTVRIWKRAPDGAWQCSDVLEDTHNRTVRSCAWSPNGKLLATASFDATTAVWEYNGADFECVATLEGHDNEVKSVSWSPSGSLLATCSRDKMVWIWEVLPGNEFECVSVLPGHTQDVKMVQWHPILDILVSVSYDNSIRVWAGDGDDEWHCVQTLTEANNCGHSSTVWALSFNLKGDRMVTCSDDQTLKIWDTSADLSQPKTGEGHDSCEVIHVV

SEQ ID NO: 68832 - protein, 1504 aa, Zea Mays
MEGSPADAAGSGRRTRTRGAEASGRAAVLQQLRAVRSGQIRASDAIQVKVDAPIYDTVPEEEYNVLVARRRKEAGEFIIDDDGLGYVEDGREEDWSHRALPSSSDEGSEGEDGAPRKRKQTRPPQAKRQPQQSAKVASLSAAAAKTGQQISSMFTSSVFKGRGSDRAKNLALAADSIVDDVIAEFAPDENDREERRRRVARVCAPQPVPTVSYIKPQKVILDAEMVRSENENDMVVVELKNDTEMETNLEEIPGSSAELVVNKSLEEPKQEDNGEVKIEKAHRLNAKIKAEECRNNDVTSATEGWMKICGNGENAVGEEGVAVDGNTNVDESSEFELKDGALPFYILDAYEEPFGANSGTVYLFGKVEVGKQFHSCCVIVKNIQRCIYAIPNRSVFPMDSISGIERNPTADLLPSLRATLHELASGLKSEIADKLSDLNVSNFIMTPVKRNYAFERTDLPNGEQYVLKINYPYKDPALPADLRGEHFHALLGTNNSALELFLIKRKVKGPSWLSVSKFVTRPSTQRVSWCKFEVTVDCPKDISVLTTSTNLEVPTVVVGAVNLKTIINEKHNVHEIVSASLICCHRVKIDSPMRPEDWQKRGMLSHFTVVRKLEGSIFPIGLAKEASDRNQKAGSNVLALESSERALLNRLMIELSKLDCDVLVGHNISGFDLDVLLHRAQTCKVPSSMWSKIGRLRRSLMPRLTKGSTLYGSGASPGIMSCVAGRLLCDTYLCSRDLLKEVSYSLTQLAETQLKKVRKEVSPHDIPMMFQSSGELLKLVEYGETDAWLSLELMFHLSVLPLTRQLTNISGNLWGKTLQGARAQRVEYLLLHSFHARKFIAPDKFARNKELNSTKRKMNPDTGGANADDGAADPSVDDEVHNGDQSKARKGPSYAGGLVLEPKKGLYDKYVLLLDFNSLYPSIIQEFNICFTTVERSSDGSVPNLPASKVTGVLPELLRSLVERRRMVKSWLKTASGLKKQQFDIQQQALKLTANSMYGCLGFSNSRFYAKPLAELITLQVIYGDTDSIMIHTGLDDISRAKAIAGKVIQEVNKKYRCLEIDLDGIYKRMLLLKKKKYAAIKVALDGSLRENIERKGLDMVRRDWSLLSKDIGDFCLKQILSGGTCDDVVESIHSSLVQVQEQMRSGQIELEKYVITKSLTKAPEDYPDAKNQPHVQVALRLKQNGYSGCSAGDTVPYIICSQQDSDNAHSVGIAQRARHPEELKRDPDKWMIDIDYYLSQQIHPVVSRLCASIQGTSPARLAECLGLDSAKFQPRLTESSNQDTSMMLLSVIDDEDERYRGCEPLRLSCPSCSGTFDCPPVSSLITSASATSVSDPIEGKDATANFWRHMRCPRCLDNTVESKFSPSMLANQMKRQADNFISLYYKGLQMCDDEGCKYSTHSVNLRVMGDSERGTVCPNYPRCNGRLVRQYKESDLYRQLSYFCYVLDATRCLEKLDQKARLPFEREFVAVGQTIKLALLEIQKIRDRCAFGWVQLKDLAVSI

SEQ ID NO: 68833 - protein, 1074 aa, Zea Mays
MDGKGLFAEIGMKEEDIATMLSGKKVSELAEDAFDGSKEERQIFEGVFCLTNVDGGLNDHYHGGIGHTVHAGKVVTSSRKPSSSADNYKAAHCRIVESFTAGNLSSYRVSCLGADEQAHGAMHSPDAVRFKLAVQWTPPRPDRVYTRRVVTRRSERARICSAMDLESIDICNFSRQRDGRGHGQLWNHLRMHAHLLMVDAGWKIEAKERDNRSKVDHVYVAPDNVTRLYSLPRAWKCFGQWLLMTTPCVNGNESIDYGKEWSNMHEFLYDLKNTLLCLQYEVQRTKPALSFLYQWQLLDPFMAVVCIDKKVAALKDGVALKAVNSTVTCLNRSECKMLDAKNSNRSLGVNSTSKYMNPYLSSCKKSLLPLLSESDYQPDKEGNTMPNEEASLFCTNKTSEDEADRRSLCMSEMNEIGIRSTAHHIVMGLHDATAFHGSSQTCSGRKRKFPCIKSKEDNQTEDKSDPLFFPPSYSSTLSHLVENVQINDVSPHGYETTEIPNMGNRTDILDKMYLGENLLFAPETGNMLLETTDDINNEQHDDAAVSEPQSADNDGSGPSGASSLPPEKDAYMGSKEDSINDYHDPSVVSEFQIANNDAKCEPSIAFLPEKDKDLEANKTSLEGPAKTGQLSSEASGSTLMISEPQVLFVSPQDGTLSFMNNNTNNQEMWRFLNVSPDTMDTEMQMDSNSLVYEASLIQGFLYLDNEGSPICWTVMNPEPPRRLICATALEPNSKLSKQYVEMRLENDASTSEHKKGGKLSDKAADIQDNVSRKKQKANIASLNNCVSMDNLTVNPIDPVVLNEGEQTGTAITEQVPVPLNLVLENKNDKDQGEQSSETSEQLMSKEPQKRDIKRQKRTWSHTCKFDDDDLLMTAVIYKLTARYRNSFHRKLRNKFGFRRLPTYHWENEDKGDRKKFPGEARTVLNKLLEMGIVARVDILQCHGPGGKNVLKDGNITASGIQCQCCGTTFTMSKFKCHAGLRQEVPSLNLFLDTGKSYSLCQLQAWSIEQKVRKEHAKDTMSLQADQNDDTCGSCGDGGELICCDNCPASYHQACLSCQMATGTALAAFATFVVK

SEQ ID NO: 68834 - protein, 668 aa, Zea Mays
MRSSWADSVANAEESAPATAAANGSVATHSTSRPTRSSYVPPHLRGRSAGAAVEAQAGLVAPAQGGPLPLAAAQPSGQGAAVGGPRWAGIVNGGGGGGSIGAPRQGHGGGGGGRGAWNSRPGGWDRRDREPDPFAKAEAEEIDFDGQENTGINFDAYEDIPVETSGHDVPAPVNTFAEIDLGDALNDNIRRCKYVKPTPVQRYAIPISIAGRDLMACAQTGSGKTAAFCFPIISGILKSPKPHQRSRSTRTACPLALILSPTRELSVQIHEEARKFAYQTGVRVVVAYGGAPITNQLRELERGVEILVATPGRLMDLLERARVSLQMIKYLALDEADRMLDMGFEPQIRKIVEGMDMPQRGERQTMLFSATFPKEIQRMAADFLADYIFLAVGRVGSSTDLIVQRVEFVLDSDKRSYLMDLLHAQKANGTHGKHALTLVFVETKRGADALEDWLFRNGFPATSIHGDRTQQEREHALRSFKSGATPILVATDVAARGLDIPHVAHVINFDLPNDIDDYVHRIGRTGRAGKSGLATAFFNESNTTLARPLSDLMKEANQEVPKWLEGYAARSAYGGGGGRNRRQGSSARFGGRDFRRDRGSGGGGRNRRQGSGARFGGRDFRRDRGSGGSYGGGGGGGGGYGGSSGYGGAYGGGGSSGYGGGQSTSSWD

SEQ ID NO: 68835 - protein, 63 aa, Zea Mays
MISHLAEPPKTSYARCRSSQTNCPGPMATRTNPQQWRLSDLTLLQSMADPGAAWRSWERFADI

SEQ ID NO: 68836 - protein, 733 aa, Zea Mays
MFEVRILLYDYMRSSICRVITILGNKVSSLTIKDVTRNCSLPSTHVYSGRLTDKIPLGKIERSVQAVEAALKKLENGGSVNDAKAVCEPEVLRQLARWHSKLRVYISPFIHGTRYSSFGRHFTKVEKLVEIVDFCCGANDFSRLMKEKLDKVQKKCHFKNYDLIQPQNRFCFEKRDWMTVQPNELPHGSQLIMGLNPPFGVKASLANKFIDKALTFKPKLIVLIVPKETKRLDQRRTPYDLIWEDSECLSGKSFYLPGSVDLNDKIVEGWNASAPPLYLWSHPGWTKKHMQVAEEHGHTCMGKIACHVEESNLSDDLSVRKQSDATNKLNSRSGKETPFNDRMSNLLDDGSARKQARSEEEKRTLGKIEHHVKKANIPDNLPVKKEPEASSKVMSHSGKDRKIGRYNRRRHDNRSSKGTPDHTESLPPEKQVEVAYEETRVIPSKKIAHNEKKSAQYNYEQTAAGMPNMRSRGGDSDMSISPPVSCNARSKPMSYSLTRPIEHLDTNAHLLAEEPSDSVLNRVPNHDSYLAIKEEYCDGFKRKNDPIFSHIDDSSRMRGSSIEEVTKPYITAPNSDPWSKGDGSFYRHPSSEDLNANADVLMPGYSARYGQIGGDSNPQASMVPLATDSRLHGGTVADNYLSARYSLGSSGARVSQPAPTVPPFGLSGASSQRGSVMDRYSYGLSGPTGTQRSVIDRYAPSLDGTNTTRSRSSLPEQYPFGQPGSSGGGWPHH

SEQ ID NO: 68837 - protein, 581 aa, Zea Mays
MGKQQQAPPARRSTAMSAPPPPKRRKKKGRPSLLDLQKRSLRLEQQLQQQQPKGRRSNRRSAGSADEDDDGPASGSGRREKKLRLVMGLHDGSPKVEKTRKATDGHEEPSDSGPTTPLPNKKLLLFILDRLQKKDTYGVFSEPVDPEELPDYHDIVKHPMDFSTIRKKLDKGAYSNLEQFEDDVFLISTNAMCYNSPDTIYYRQARGIQEIAKKDFENLRQDSDASDPEPEPELELEPEPEEPKPQPRRGRPPNKNNAKQKVGKPPTERATADFSGATLATAANIGRHAQADVDLSRRAMDKAMMDMLRASFANRRNEHNWSGERKFERFEECSGYRGTWSAKMGKRPILMEDSRRSTYCETQPSNSIYELPVSSSYNGTKKLLVPVGVQLQQSYSRSLARFAAQLGPVCWEIASRRIERSLAPGTKFGRGWVGDGETPNSFQPPVLAAFSETTTPQDRTAASGEQPCPSMSSPPATEACAGNDRSHLAGSQPDATPYASTSTTQRMSSEALASQQCGSLPQISINRAERTLEMMKGSPNNLHGHPGMQQTANGFNAVPGPMMFPHVAQLVVNQMQTHTAD

SEQ ID NO: 68838 - protein, 764 aa, Zea Mays
MSFTPVPRFRGAAYSQLCPQSSSCAEHLVNVDGASAKDLSVDPSTFCIPQDANQGFCSRALQYTSSVSKQGFAAQGLPVNAAEFGLNNDSSLVGGYQQFDYLLGPPQTEVCEGMWMKNINTSIIHRRRPSNASCLDHTEELTSYENDEGAISFGSSCSTGIASYPYSTPLQRNSHISDTRDGTWDALVQMQEALEASNSDNGLNEECSDLTFNHAELSGGNAVKHKVVWDNGSLNSPSFTSNLLSFPGDTETTLTSASTVYCTFQNFADLQHKMNNNEQNKLSSEVELPRQKVPMTNHVNGSGGEMHSAEWGTNPGLIESSGFMPSNEDRQNDISHQPSSSFVYSADGTVDHCSKKSPLMYECEEQMEIDSLLNSFGVSTDSFSQTYGMFERSNNLVEFDMKTELDESGSAACFNNNAPYMQTGPPESAISDGSSYPEQYQSTSQTCGLVYASASQWQNMSSSGLPLLDCRKSIGEPTSIISLGGNGKGHLLPTSEDTLLQKPQSVAPDARLEMTDNVADCYLESAASLDGHSCPLGASACHDEAMAAKDLQTAQHGVVTDCTFGIHTSNHAGHSDMLLPITQTTSVQEPGLSLSKDLNSSCIRGTEVKKVDLTATYNSERHGILRLKSFEQKTPESMGMKTYIYHCGDHSQIVDPQQSIILAASKPSHSSVLPVDKSDGKVVSQQKKRKRAAENLLAWHDHIMPGHGSMHRRRTPELDWARATKRLVEKLDFLPQMLLIPLRPLYTTFLNPHSVTHVTLLYLL

SEQ ID NO: 68839 - protein, 63 aa, Zea Mays
MVFMGVISLDAWWTLGCGGLGACSSSLSDHGHLLLDHCSPLEAAHYLDLFLHHLEPHPHLELV

SEQ ID NO: 68840 - protein, 59 aa, Zea Mays
MVVVKSGNMYEGSSRPLGIFSLAMLWSFTSDYSSESDVLDPGVSWATKPKQDVDTYNHG

SEQ ID NO: 68841 - protein, 265 aa, Zea Mays
MEFCAESPQWLYKCGKISEAEMQFEKLLGPLHVKSAMAELSRYERVDDGESVKYSELFYGRHFNVVFIGTTLFALQQLSGINSVFYFSSTVFRSVGVPSNLANICMGISNLSGSIVAMLLMDKLGRKVLLSGSFLGMAFAMGLQAVGANRQYLGSACVYLSVGGILLFVLSFSLGAGPVPGLLLPEIFPNKIRAKAMALCMSVHWIVNFFVSLMFLRLLEQLGPQLLYTIFSSVCVVASIFVRRHVLETKGKTLQEIEVSLLQPQ

SEQ ID NO: 68842 - protein, 417 aa, Zea Mays
MMSHRRRSRAAGSPPSDASTGTAPTPEKSGWIRPWAATGSDLKVLELALAFRAANALLVRTYFNPDEHWQCLEVAHRVAFGYGHLTWEWKRGLRSYLHPLIFAALYKTLALLHLDTPWVMVMAPRLVQSLFAAFGDLYLYKLSKLIFNGQVAKWTLFSQLVNWFMFFCITRTLSNSLETVLTVAGLYYWFAAIESSKATSIVSKQHAACEQSIPSRKVALLIAALSCAIRPTSAVTWLYVSLLDFIQMKSKCCFILLDVIPVGAIVLAVTTLLDWWMYGSWVIVPLNFLKFNLLSSGGDYYGTHVFHWYFTQGFPSMIWTFLPFALCGIVKSQEWRLSGLIAWVLGVYSILGHKEFRFVLPVLPLALMFSGYCLASMSRSKGKNQHRKDSLSRMQPFVILLVITNVPMALYMSLFHQ

SEQ ID NO: 68843 - protein, 254 aa, Zea Mays
MPDLSTSYLPPFPELSLDAGALAVDHAGNAAAAASADAASAYASSSASVGSGVDDLVIPAECRWKGHVRTFDMAGAGAVTTCPAARRGGGKKLSLIPSLEPARTQASASAPTLEERVSEWAAKKAAAGVPTHHCVLPFLTGAPMAVECRLCSKIIYVGEEIKCSVKKCPQMFHLKCVAEDTSNFTVESFRCPQHGCMVCKQKMFFWRCGRCTVAAHTKCAPWPVVHLKNDQGSAICWRHPSDWLLQNKEYFVCW

SEQ ID NO: 68844 - protein, 194 aa, Zea Mays
MKTRKPKNKICPHAGSNYRPSVYKTDALPLSYRGNCDLRLCVGYICIFQIFYYSVQPTARVSLVTPPSSLRVYTRRHSCLGAVASKGDIHGEPCTDRAGQAERGAAQGAQGADGSGGQPPPGQPHQDPHRRHPTRERLRRAPGPIPPPPREEDARAAYGVPLRSRFTGRRGEGPRRCRHRLLHRENHGSGERIL

SEQ ID NO: 68845 - protein, 246 aa, Zea Mays
MGFGSGFEGGSVPPASNSRMSALPHEPAGFYNDRGATVDIPLDSTKDLSKKEKELQAKEAELNKRERELKRKEEAAARAGIVIEDKNWPPFMPIIHHDISNEIPIHLQRMQYLAFSSLLGLTACLFWNIIATTAAWIKSEGVMIWLLAIIYFISGVPGAYVLWYRPLYNAMRTESALKFGWFFLFYLLHILFCVWSAVAPPFPFKGKSLAYFTSLDLECSALNHCSASLSFSKYTCTSVEVEKLQR

SEQ ID NO: 68846 - protein, 96 aa, Zea Mays
MAGSDAYRKSFVGSAVEHYNRDAVFATAAAQIGATTAAGHPGAQSALLFLTGTGMTRLASRSLCAGTVVSTARGRRPSHARPIRNVWVGLDPELIQ

SEQ ID NO: 68847 - protein, 573 aa, Zea Mays
MVLESYERAYNNMVRVQQLSELEEVIDYCTLPMESPIADGRRELIRNMWNERIKGTKRNVEVWQALLAVRELVLPPNEDRDTWIKFAELCWKNGRISQARSTLVKLLQFDPESSPELTLYHAHPQVALAYLKYQYAVGDELKRRDAFSKLQELSVQVATTMGNLPGTSANHGTMSNAGVPLIARVYLTLGSWKKALSPALDDDSIQEILISYHNATLSAKDWGKAWHIWALFNTEVMSRYTFRGRPDIAGKYVVAAVTGYFYSIACASTTKGVDDSLQLYFDQRKNNSAGEGKTALPDILRLLTLWFNHGDTSEVQTALQKGFSLVKIEMWLVVLPQIIARIHSNNRVVRELIQSLLVRIGKGHPQALMYPLLVACKSISILRQRAAQEVVDKIRQHSGGLVDQAQLVSKELIRVAILWHEMWHEALEEASRMYFGEHNIEGMLAVLEPLHAMLERGDETIKENAFIQAYGHELLEAHECCLKYRATGEDAELTKAWDLYYHVFRRIDKQLPSLTTLDLHSVSPELLKCRKLELAVPGTYAADSPLVTIEYFVPQLICYNVQTKAKKADNSWK

SEQ ID NO: 68848 - protein, 403 aa, Zea Mays
MWWNCLCLPWATGSIIGPGGFSFVNEMVQVETVAQFGVIFLLFALGLEFSTAKLRVVRAVAVLGGLLQIMLFMFLCGILATLCGGKTKEGVFVGVLLSMSSTAVVLKFLMERNSINALHGQVTVGILILQDCAVGLLFALLPILSGTSGLLHGVASMMKSLVVLITFLTILSILSRTGVPWFLKLMISLSSQTNELYQLAAVAFCLLFAWCSDKLGLSLELGSFAAGVMISTTDLAQHTLEQIEPIRNFFAALFLASIGMLINVHFLWNHVDILLAAVILVITVKTFIVAIVVKGFGYSNKTSLLVGMSLAQIGEFAFVLLSRASSIHLIEGKLYLLLLGTTALSLVTTPLLFKMIPAMVHLGVLLRWFSVDTNQVELGLKNDVLRIDSGKRINLIVQGSHDS

SEQ ID NO: 68849 - protein, 448 aa, Zea Mays
MAAPSHLHLHLPGCPQTLALPLPSPGGFSAWPGLRSCSRSRQPRIRPVAALGPADAGDLLGRVEAFLYTVADAAVNAEPVAAAADTGTKEAAAGDWLSGITNSMETVLKVLKDGLSALHVPYSYGFAIILLTVLVKAATFPLTKKQVESALAMRSLQPQVKAIQQRYAGDQGLLTEGFFWIPSLAGPTTIAARQNGQGISWLFPFTDGHPPLGWSDTLAYIVLPVLLVISQYISTQVMQPPQSNDPNQQGAQAVTKFLPLLIGYFALSVPSGLRLYWLTNNILSTAQQVWLQKLGGAKNPVKEYIDKLSREETTTVQKNDSTVQSEPLSKHSKPQPSQEPKPSGPQRGERFRKLKEEESMRKEVMGQGKQSEQSSSESRVTDGTQNSDVSSGDQKDQQGSHENGPVVASINGGVNHIRNEKTQNLSSEKNNPSGVHGDHTVTDVGHRA

SEQ ID NO: 68850 - protein, 601 aa, Zea Mays
MLVYIRESDKEKIMCNVDEKDIAEHLRIRLKKEQEEKEHKKKEKAEAHLYTIIKIARDEDLKEQIGKNIYFDLVDHEKVHSFRIQKQLPFTSFKEEVAKEFGIPVQFQRFWLWAKRQNHTYRPNRPLTPHEEAQSVGQLREVSNKAHNAELKLFLEVELGPELCPIRPPEKSKEDILLFFKLYNAEKEELHFVGRLFVKALGKPSEILTKLNAMAGFSPNEEIELYEEIKFEPNVMCEHIDKKLTFRSSQLEDGDIICFQKAPVPDGDAQVRYPDVPSFLEYVHNRQVVHFRCLDKPKDDDFSLELSKLHTYDDVVERVAHQLGLDDPSKIRLTSHNCYSQQPKPQPIRYRGVAHLLDMLVHYNQTSDILYYEVLDIPLPDLQRLKTLKVAFHHATKDEVVVHSIRLPRNSTISDVITDLKTKVELSNPDAELRLLEVFYHKIYKIFPPHEKIENINDQYWTLRAEEIPEEEKNLGPHDRLIHVYHFMKDPNQNQQIQNFGDPFLMVIREGETAAEVMERIQRKLRVPDDEFSKWKLAFISMNRPEYLQDTDVVSARFQRRDVYGAWEQYLGLEHTDTTSKRSYTSNQNRHTYEKPVKIYN

SEQ ID NO: 68851 - protein, 781 aa, Zea Mays
MPIGVIFQYIWYQMRSNYDYVCYCCFILVFMWNFSLLSMAYLGALFLYALCVNYGPSYLFWVIILIYTESSITAKDGEWVPVTEFSFLSARNNIEEKHCVAYSWREKLKSLPLPVFDLIRMIVRGLSRYWMSLTHGAESPPYFVQVTMEVSHWPEDGIQPERIESAINRVLAIAHEERCQANLPSSCHCCSKVRIQSIEKSKENCNMALAVLEVVYAAPVECQSKGWHKSLTPAADVEREIHESQKAGFFEEINFPYPIVSVIGGGKREIDLYAYYFGADLAVFFLVAMFYQSILKNKSEFLEVYQLEDQFPKEFVFILMVLFFLIVVDRIIYLWSFATGKVVFYLFNLVLFTYSVTEYAWGTELAHRDIGGLVLRAIYLTKSISLALQALQIRYGIPNKSNLYRQFLTSKVTQVNYLGFRLYRALPFLYELRCVLDWSCTTTSLTMYDWLKLEDIYASLFLVKCDTLLNRANHRQGEKQTKTTKFCSGICLFFVLICVIWAPMLIYSSGNPTNIANPIVDVSVKIDIKALGGRLNLFKTTACEKIPWKYLKAYDDVDPLDYLGAYNVDDIQLICCQPDASTMWLIPPPVQNRFIQSLEEREMLFGKMELILNWDFLRARPKGKELVRYESPIEHCPSVDDVKRVLNGTANSFSIIDAYPRYFRVTGSGEVRRLEAAIDSVSGELLLNNGTPWWSFYDTNPSDLAGCQGLNGPMAIVVSEETPQGIIGETLSKFSIWSLYITFVLAVARFIRLQCSDLRMRIPYENLPSCDREVSYKTILN

SEQ ID NO: 68852 - protein, 66 aa, Zea Mays
MLRNFDKSFRVWMHWKRRSSCFGDREPLRSKQQWMLSRGKVWVACGVGSLEARHQQFSSVIHIFYL

SEQ ID NO: 68853 - protein, 401 aa, Zea Mays
MSLTASGIRSTTLRMPTRRRSSRRTSRRRSRSCSGTGTRSRRGFSPARSRTRSASYEQALMDARKQIEREMERFKVCEKETKTKAFSKEGLGQQPKTDPKEKAKAETRDWLNNVVSDLESQIDNFEAEIEGLSIKKGKQRPPRLVHLETSITRHKAHIKKLESILRLLDNDELSPEQVNDVKDFLDDYVERNQEDFDEFSDVEDLYSTLPMEKVEALEDMVSLAPSSLVKGVAPVSTTAVLSTKSSVATSPTQPTVSTASSQSTSQDQTEETASQESNPEPTPQTPPPKGGNPGPSVPAVPIVVSTGSAAVSVPAETISSPVRLTVPATAATVLSSAIPRSAPENTLAVTSIPANLSTTLKDDESMSVPPRRPSPATEIGIGRGITRGTTSQALAVGYASW

SEQ ID NO: 68854 - protein, 189 aa, Zea Mays
MSDDSNKKLVYEEMKKAVEKDRSTVGVSELSKLGLMEITRKRVRPSVTFMISEPCTCCHGTGRVEALDTSFSKIEREICRRLAASRRKSDPEKPKSWPRFLLRVDHEMCTYLTSGKKTKLGLLSSSLKVWILLKIARGFSRGAFELLPYSEKENYSMEKETSELPQKESRPKLSVFPIKKWMSRAKRAK

SEQ ID NO: 68855 - protein, 403 aa, Zea Mays
MELRNRLTELKRKTAVDKTEVEQASSDLKAKIVPLNLALATLKKRRADAVAMHTNAMKVAQMNLMATTSDCMKMQSKSVKQLCRLFPMRRVIKEGEKKDGYNGPYDSICGVRLPRGLDPHSISSEELSASLGHMLHFINIAVRILSAPALHVSGCKGSCSNIWQRSSYWSTRQSQSKVYPLFIPRKNVCTGGEETSLTESGSSNFGVDSVDSVKKPSFDPKRSNSFNFSGASSHSMERHQYLQRGISLLKTSVTAITTYYYNSLGLDVPSNLSTFEAFAKLLHMLSSSKALRTAFELDIASRSEKQAQQLNRSIWKASSAISSDSSFMDSMHTTIMPSTLDNLLMNSDESLYTGKLVKHGGAPDSIFDSWDIVEREVLPPPPSRVEDVAQWEWAMYAGSTKKK

SEQ ID NO: 68856 - protein, 134 aa, Zea Mays
MAFYPIPSPFLSRRFPEREKGCPSARNLAAPPRAHDCVLLGEIKGARVCRRGSLSTSVVCGGRKSTRLLGISRRRSFPSRRRGQPCAHRLLCNEVTSHLKTNLVPGISSLRQVVPLITFLYPIMFMLITVTCSG

SEQ ID NO: 68857 - protein, 246 aa, Zea Mays
MIGQYISSNGGVVTAEELAPFLDVPPPSEESKDDESFVLPVLLRFQGHPEIDEQGNILYRFPSLQRTASSKSGRSREYVGTKWSAMFSGVEKYLEEKPWKFSKANATEKAMVAGLGGLNLFGVIILGNLLKQMTVTPGGLISFAAQLYPLLQIYAGSFFAIPLFRWFLLRKTNNGIKKRNKAREQRAQELVSPDSSLRRKLLSARDMAERKVITPEEIVYTTEKDLLEQDYEVKEWERRFKELESE

SEQ ID NO: 68858 - protein, 763 aa, Zea Mays
MREACMAILYHTFGQCAENFQSTSLIHSHDALTSISDVPAKRNKVLDLLEVLQFRCPDTSTKYPQLLSSLGIESKIEEILRNSATFENGGVYYYSERGDRLIDLDAFREKLLQISQELNSQLTEPEKAGLKESVHHLLKWAWRYNKNLEEQAAQLHMLTGWSQIVEVAVSRRMSLFEDCSQLLFELLDASLNATTSPDCSVKMAYVLTNVSLTCMAKLRDERFICPAGTDSDAVTCLDIISSKQLPNAACNSLLFKLVMATLRNESSEILRRRQYALLLSYFQYCSSILDSDVPPSVLRFLLLEEQDGDDEDITLQKVLKEHNELAHANFSIIRKEAQAIVDLVTKDAFHGSEAGKALSFYVLDALISIDHEKYFLNQLQSRGILRSCLSDVANYLSKGQCLNPQAQRREQSLRSPSLTYKVLVLGFTLVFGPSTVARPFKNPPSHQDPSQPPETRQNPSQPPETLLLSSVLSGFCRRLCSSLQVLQPAERQRADQPRGRGSSPRKGEGVEPHQGAGEGDFTREGEVAGSRYGAAAVGELRAAVTWTSREALTASFSGITSPLLPCLVKNKIVREIVDFAKQHQSVFNSILRENMTGTNLLTLEQLSMAVSILSKVWAYEENEECSYIQDLFSLMHSLFSVDFGILNFMQSPNMIENQKSELIAFGLCFSLVSYLYVLATRKNMRFQVSYGRNSDQQHPTLQMVSDLLNSATLALERVGEEKYMLLNKIRDLNELSRKEVDEIIKVCMKQDCISPNDNIRKSF

SEQ ID NO: 68859 - protein, 229 aa, Zea Mays
MMLHLCSLHDVTYGDDSACFACSVLELVDAAVDPSLLEPIKETILRVHGVKGCHRLRGRKAGTSLYLDVHIEVYPFLSVSAAHDIGETVRHQIQKEHNQVAEVFIHIDPSYLVGPTMDLKRILKDSDGTNSEAIPRQQSAEAIVSNIISSHFSEKMALEHLMLHYVQGRVLLQVQVSMSPEILIRDAMEVAKQAEEEILRADASISQISLQLRLGQQIKQLQLASQERR

SEQ ID NO: 68860 - protein, 354 aa, Zea Mays
MGSNDPSTPSKASKASKQDQPPATTSSGTVSVYPEWPSFQAYQAIPPHGFFPPTVAANPQAHSYMWGAQPMVPPYGTPPPPYVMYPPGAVYAHPSTPPTMHPFSHYPMPTNGHAETPGTAPSAPEMNGKSEPGRTSAPSANGITSHSESGSESESEGSDANYENDSHSKDNDGKEDGNSQNSISYSASQGVLNQTMAMLPIQPGAMVGGVSSSTANLNIGVHYWEAPGSAAVSATHGKAPAGSARGDQWDERELKKQKRKQSNRESARRSRLRKQAECEELGQRAETLRSENSSLRAELERIRKEYEQLLSQNASLKEKLGGSSDPIPDMNEQNDGNGSDKKQSDSDAQPGSES

SEQ ID NO: 68861 - protein, 478 aa, Zea Mays
MPMDPSAFQIIECAEAPNTGVVSSKFALNVACDSPMDLNLTNVGTSDNILYTSEFAVPGRTEDRSMQVDFHDAKAALHKPNLPLEVVDTDTHDLQSSRNTESTILPSFGDDPMKDSSGALNNGLGRSTSSQVTELTHLHRSHPPADYNPFSLHSHDSPSVSGNSEHSVPTALTLGNNIYFSSAESEGQPEENHNLLDVNLGFDVTTTEFGNVVKRKGESGNDLMNAGSQNWLTLPLTVSCLDNASAVSNGRIGLEQIVDEGVPVICQDHDIMLDIDQRGSIDVLSGQDHNLKLCGISIPQAVLLATEERNKDVDDEIVRPGSSINSVNVLDKYSYCTVGKPIDNLSRPILLSSQSADVPGRDLASQISVDSDHTYHGSTEDPVGMSSTTPDSVSSWIEAIVPEANKEHQSCKSSLLPICSSEKVSAPKEDSKKALSDSVVNSVVKSPPRINIASSTVLKLKDPRPHLCHFIPNPSVVL

SEQ ID NO: 68862 - protein, 507 aa, Zea Mays
MGIQGNKAATHEHDFLSLYAAAAAAAAAKDAPLLLHDSKTPPPSQGNFLLKTHDFLQPFDQKPGAPPEPSPLPAPAAEIRHRQQVAVAKQRALPLPLPGGVGTFSISPAPVSVALPSAVVKSEPPPFVLWGQPAATLQPGARGHQQQWALPFAGSLQVSPPPQQAQPDRKGRGGGGVMDSGSRSSGGAGFDDEDGLTTRREVSSSLQDLAVRVDWKGGSCSDGGTNQGPNTPRSKHSATEQRRRSKINDRFQILRELLPHNDQKRDKATFLLEVIEYIRFLQEKAQKYEATFPEWNQENPTMLPWSNMYFRSFWKNAQSKGQIPGDSPPDPSHFVRNGSSPGSNFTGKLDDNHTSAAASGALDQAETNHVASGCYRSSETPANITSPSPVDDSAVKSEMLNSQELAIDEGMISVSSTYSQELLISLSHALQSSGVDLSQTSISVQINLGKRAGKRSASAGGVSSNSKEPPADPASSNELGGHHVTTLGASADGLLPHATKRHKRDNS

SEQ ID NO: 68863 - protein, 174 aa, Zea Mays
MYFSPSLLALSFAPLATTGLLLRLALRKQTGKQESSLPYILLLLLLNTHACALPPGAAYEPDMNREHSSSSSSKLINEKLEEHRISTAKHCPHCGEKIDSKPDWVGLPAGVKFDPTDQELIEHLEAKVKDEGSRSHPLIDEFIPTIDGEDGICYTHPEKLPDIFLAFRALLSME

SEQ ID NO: 68864 - protein, 686 aa, Zea Mays
MVWRCNGKICCWWRVEASNYCRGSGKHPQLMPSTPRWAVANGAGVILSVCDEEVARYETANLTAAAVPALLLPPPTTPLDEHLVAGLPPLEPYARLFHRYYAIATPSATQRLLFGLLEAPPSWAPDALDAAVQLVELLRAAEDYASGMRLPKNWMHLHFLRAIGTAMSMRAGIAADTAAALLFRILSQPTLLFPPLRHAEGVEVHHEPLGGYVSSYKKQLEVPASEATIDATAQGIASLLCAHGPDVEWRICTIWEAAYGLLPLSSSAVDLPEIVVAAPLQPPTLSWSLYLPLLKVFEYLPRGSPSEACLMRIFVATVEAILRRTFPSETSEQSRKPRSQSKNLAVAELHTMIHSLFVESCASMDLASRLLFVVLTVCVSHQALPGGSKRPTGSDNHSHEEATEHSRLTNGRSRCKKRQGPVATFDSYVLAAVCALSCELQLFPFITKNGSHSNLKDSMKIIISGKNNGMNNELHNSISSAILHTRRILGILEAVFSLKPSSVGTSWSYSSNEIVAAAMVAAHVSELFRRSRPCLNALSALMRCKWDAEISTRASSLYHLIDLHGKTVSSIVNKAEPLEAHLTLTPVKRDNQHHREESNTSSLDSVKLENKNGSTSHKKNGFSRPLLKCAEEVLLNGDVASTSGKSIASLQVEASDLANFLTMDRNGGYRDVCRKYISSPRMEEGC

SEQ ID NO: 68865 - protein, 101 aa, Zea Mays
MEVRQLGNSRSITVLNGGSAQSGVSGLIVPAATVGALGYGYMWWKGISFSDLMYVTKRNMANAVSSMTKHLEQVQSSLAVSTYSFLIYHRNYTFNCIMCLL

SEQ ID NO: 68866 - protein, 142 aa, Zea Mays
MSFLVSYHCTQITVISASLMSSFLSGTVLMLLAWHVVGQGHHHDSASLCSVAPPQSSCVHLSPNRTARPTVDPAISSQRSDIDIVTRQHVCLSPHYLLHHGSVGLRVLIDTKLSISARSCPSSSASSSLFFCYVTSVRGLVS

SEQ ID NO: 68867 - protein, 2448 aa, Zea Mays
MKPLSRNIVRFEIVHLVYNPLVDHYLAVAGYEDCQVLTLNSRGEVTDRLAIELALQGPYIRRLEWVQGSQVQLMVVTNLFVKIYDLSQDNISPMHYFTVADDVIVDATLVPSSMGKLVLLVLSESGVLYRLNVTLEGDIGAKILTETVLVEDVISMHRGLSLYFSSTYRLLFVSHQDGTTFMGRLNADSSSITELSYINEDHDGKSKPAGLYCWRELVAGSGILTCLSKSKSNAPLVALLSPHQLVAQNMRHNTGANSSVVGVAAYKPLSKDKTHCLLLYDDGSLHIYSHTPSGGDGSMNLTAEQTKKLGSSILSSRAYTGTKPEFPLDFFEKTTCLTCDVKFNSETTKSGDSESIKQRLTSDDGYLESLTPAGFKVAISNPNPDIVMVGCRIHVGNTSASNIPSEITIFHRVIKLDEGMRSWYDIPFTTAESLLADEEFTITVGPTFDGSSIPRIDCIEIYGRAKDEFGWKEKMDAALDMEALGGNATGGRSGKRLQIVKAAPIQEQVLADALRILSRIYLLCQPSCFTDMVDGGMELDNMKCRALLETIFQSDREPLLHSAACRVLQAVFPKKDMYHHVKDTMRLLGVIKSLPAITSRIGVGGAASSWVIKEFIAQIHTVSKVALHRKSNLASFLESHGTELVDGLMQVFWCILDLDRPDTQTINSLVVPCVEFIYSYAECLALHSNEKTSVSVGPAVALLKELLFAPYEAVQTSSSLAISSRFLQVPFPKQTMIANDDAPENQAKASASAMNSTSANSQVMIEEDPVTSSVQYCCDGCSTVPILRQRWHCSICPDFDLCETCYEILDADRLPAPHSKDHPMSAIPIEVDTFGGEGSEIHFSVDELTDSGVLHADRSVQTSPSSIHIFDASESADLPETITDQATVSISASKRAINSLVLNHLIEELRGWMGTTAGTRAIPLMQLFYRLSSAVGGPFMDSSKPENFDLEKFVKWLMDEVNINKQFPAKTRCTFGEVLILVFMFFTLMFRNWHQPGSDNSHSKSSGSSDLTDKGPAQVLGSTTITLPSSSADLDKNEFASQLVRACSALRQQKFLNYLMDILQQLVHIFKSSSINGEAGSSGSGCGSLLTIRRELPAGNFSPFFSDSYAKSHPTDLFMDYYKLLLENTFRLVYSMVRPEKEKSAEKDRCYKVPNTKDLKLDGYQDVLCSYISNPHTAFVRRYARRLFLHLCGSKTHYYSVRDSWQCSHEVKKLNKIINKSGGFRNPVPYERSVKLIKCLSTLCDVATARPKNWQKFCLKHMDLLPFLMDNVYHFSEECVIQTLKLLNLAFYSGKDANHNAQKAETTDLGGSTRTSSQSPDMKKNRKADDGSEGSSEKSCMDMEQVVEMFSDKEGDMLKNFINIFLLEWNSAGVRHEAKCVLFGVWYHAKNRLRETMLSILLQKVIHLPLYGQNIVEYTDLITCLLGKVNDFSAKQNHSELVNKCLTSEVISCIFDTLHSQNELLANHPNSRIYNTLSCLVEFDGYYLESEPCVTCSCPDVPYSRTKLETLKSETKFTDNRIIIKCTGSFTIQSVTMNVYDARKSKSVKVLNLYYNNRPVTDLSELKNNWTLWKRAKSCHLTFNQTELKVEFPIPITACNFMIELDSFYENLQASSLESLQCPRCSRSVTDKHGICSNCHENAYQCRQCRNINYENLDSFLCNECGYSKYGRFEFHFMAKPSFSFDNMENDDDMRKGLAAIESESENAHRRYQQLMGFKKPLIKLVSSIGEQEVDSQQKDAVQQMMVSLPGPTCKVNRKIALLGVLYGEKCKAAFDSVSKSVQTLQGLRRVLMTYLHQKSSSDTNALPAFSIPRSPNSCYGCSTTFVTQCLELLQVLSKHENCRKQLISAGVLSELFENNIHQGPRTARTLARAVLSSFSESDEDAVHELNNLIQKKVMYCLEHHRSMDIAQSTREDLLLLSETCALVDEFWEARLRVTFQLLFSSIKVGAKHPAISEHIILPCLRIISQACTPPKSDCGDKESGLGVSSLTLHSKNDDTTGNTASNNPNTKIQSDISGKIYDGSRRDQDIPLLSYSEWEGGASYLDFVRRQYKVSQAVKGSAQKTRHDSYKSDYLVLKYGLRWKRRACLKSSKSDFSKFALGYWVSDLILSSCSQSIRSEICTLISLLCPSNSPRQFQLLNLLMSLLPRTLSAGESAAEYFELLGTMIDSESSRLFLTVRGCLTTLCSLITKEVSNVESQERSLSIDISQGFILHKLVELLNKFLEVPNIRARFMSDRLLSEVLEAFLVIRGLVVQKTKLINDCNHLLKDLLDSLLLESTENKRQFIRACISGLQRHVKEKKRRTSLFILEQLCNLICPVKPEPVYLLILNKAHTQEEFIRGSMTKNPYSSVDVGPLMRDVKNKICNQLDLIGLLEDDYGMELLVGGSIISLDLSISQVYEQVWRKHHGQTQHCLSNVSAITGASSIRDCPPMTVTYRLQMVKLLSL

SEQ ID NO: 68868 - protein, 224 aa, Zea Mays
MEAAPRGGFLRQGEGRRRGGCPACGPRRRGSVRQASRRRKTSTWRGRPGGACGGWHGLGRRCGGWRRSRPRPSTSPSRSSTTSSSTSSKYACLVAEEAEAADQPSKAPYEKIVGVVDCTVQDEDGILKHLRGADEYLYVSGIAVLPPFRRRKVGTALLKACEALGLQWRHVFMVLRAYEDDDGARGLYSKAGYRVVSRDPDWVSWVGRRRRVVMVKELPVHDDQ

SEQ ID NO: 68869 - protein, 230 aa, Zea Mays
MYGTSDPTAAERTAFRRAEKQYKLYKTLNVKGRSRSRSRSGCRPSSGEGGGADLSAVVDFHALLAADGELPDGIGRRECPGFDRPVFCFLDRPGFYFIPGALSTEEQCCWIRESLKTFPQPPNRTNLTAIYGSISDLLIAAENQQILVEAENPDIQERNKQNNCGGKTESKYFKFVDSESQKGEEHRSNAATTLVRKLRWSTLGLQFDWSKVTCLVAMLMTWKQIGQNLL

SEQ ID NO: 68870 - protein, 164 aa, Zea Mays
MGSNHASQLLATAINPCRMPPARYITQPHRRCPFSQHAVVGSRCCYLHPSHSPCSTKMPPRSLTSGGCTLVVAAPCPSTRSPSVSPLAQQPRRLRALSARCFVKPVDSTPSTLAGCLLFLRSPIRDVVETPSGRRRASRLARSMKYRAMWTAHASSHDPFRTER

SEQ ID NO: 68871 - protein, 407 aa, Zea Mays
MTLMVGLGPPLLAVSNPVSGFTFPLRVSSRLSPRRVAVESAIPFTPVPLPCNREQKPPFQNEDEPAAGAVPSRAPPAPGHLLRVGSRASERHPRLSSPSASPTRRLLASEVKSSTPYHHREFQPIHFRGLLPSALFKPSATATPTTPPAASPASSPSPPTIHASKRRRRETEATGNTPLRGGRGPAPRRRSSTPPPLSLPAAEFDPLDPDADPPPKLLTADEVRLCKQALKALDKKVGKPATLTKEFRSLPDIRTELQSVQKFSVARKQENRGRNRYTDVLPFDQSRVQLESSTGNDYINASHIEIAGRNLTKFISTQGPLANTIEDFWQMVYENHCPVIVMLTKFDGLKCDEYLPLSKGQAVFGKFTIKITKFRKDGQLLLRGVEIRQDEVNIYKSDEVRSLLHIE

SEQ ID NO: 68872 - protein, 100 aa, Zea Mays
MKKKLKDELDSRNTIQHYICPSCNKRYSAFDALQLVSYTDEYFHCETCNGELVAESDKLASEEMGDGDDNVRKRRREKLKDMQQRIEIIHSLFAQSQEKN

SEQ ID NO: 68873 - protein, 350 aa, Zea Mays
MDMNSNANNSTAAAASAPINNQQAVVSSPTRKEQARNPKKARAAPQQAGGSGEPRPRPPPDAAHSCPRCSSTNTKFCYYNNYNLTQPRYFCKTCRRYWTHGGTLRNVPVGGGCRRNKRASSSSSPFPGPSSTAATSAAMEKTVSTRLMLMATSTMAMPSPTAGLFVPDDMSPAFTPTTGGSGFDDLAGMDEQHQQGFLPFSPLSLSDQAPELAPGGGGDTTPSFLDMLTGGYLDGGGYGGMSGGSDAMDMPFSLPEMGPPTTDPMPFQLQWTSSELDNYINDDGGYAAGPAAGVQQQQQQQQQQINGGDHQKQDENKEAGNGKGNDDGGGGSSSVYSFWMNTSGSDGAEG

SEQ ID NO: 68874 - protein, 174 aa, Zea Mays
MAPAAPDADAYDIPWVEKYRPSRVADVVGNSDAVARLEGPPGTGKTTSILALAHELLGPSYRDAVLELNASDDRGLDVVRNKIKMFAQKKVTLQPGRHKIVILDEADSMTSGAQQALRRTMEIYSNTTRFALACNTSSKIIEPIQSRCAIVRFSRLSDQEILGRLMIVVAAEKC

SEQ ID NO: 68875 - protein, 294 aa, Zea Mays
MRPAVLAALLLVAAAASTAAALYSSGSPVLQLNSNNFKSKVLNSNRVVLVEFFAPWCGHCKQLAPTWEKAAGVLKGVATVAALDADAQQALAQEYGIKGFPTIKVFSPGKSPVDYQGARDVKPIVEFALSQVKALLRDRLSGKASAGSNGKTSGGSSEKNEPSASVELNSRNFDELVVKSKDIWIVEFFAPWCGHCKKLAPEWKKAAKNLKGQVKLGHVDCDAEKSLMSKYKVEGFPTILVFGADKESPFPYQGARVASAIESFALEQLEANSGPVEVSELTGPVRLNLHGCHG

SEQ ID NO: 68876 - protein, 117 aa, Zea Mays
MQELFINSSADGSLAMEATTCMNETHPGDDSDFNDDVCSDFSNYPQPVHDLGDDSDTLQSPNHHPSQSVDHSSSSSGLKRPQGEGVPAKRNVEPKSRTTKHTKIKRVCVVSYLLHQT

SEQ ID NO: 68877 - protein, 602 aa, Zea Mays
MSEKLDRLELVLESKDKQLEELHGLYESQKVLSADLSDQLQTLQKRMKETECTLADLETRYMKANDTIKEKQYLIENLLKSEKVLVGEAQTLRSELENTAGDLHGLFSKLERKEKIEDKNGSIIQYFHSQLIQEMNVLHRTVSTSVSQQERQLKALEEEMQSFVTSKGKVAGGLQEHVRKLKESFNSRIAELHGFANELKHKSMLSFENLNSQVTTHTSSLEDCMKDLLVDADELLIALQNGLSQHEVNFATFIEQQHEGLSRNLEGTKFVSATTMNFFRTIDSHALGLLKILEESKMEHQKQLFQLQKKFEAVVADEEKYLMEKVAGLFAESNARKKNMVQDDICSLNRTVSESSNNLQTETTKLHDFTSSMKEQWEGYMKKTEEAFQQNVSSIEQKRGFLAGNFQQCKEKVESCSEQWITAQNLVLALGRRNAEAIGLVISDGNEVSNQLGARISSAVAAGFEDNDISSKSLLSCIDDSLKLDHGIRENVKSIVMTSRAQLHDLEHGHYEMTKAITGNADRSLGEDYKVDEATCSTPRRREINIPDSQSIIELVTPLEDIVKSFWDSRTPTKPALNAKGKQQLVGSTTPETQRAPLSAIN

SEQ ID NO: 68878 - protein, 121 aa, Zea Mays
MGNMMDNLLVRSLTSKSKGRVDDIAPPSPVKAPDDDETDKAEGEESPMMETVRSKCITQLLLLGAIDSIQKRYWSRLKATQQIAIMDILLSLLEFASSYNSPSNFRTRMHHIPLERKRSST

SEQ ID NO: 68879 - protein, 232 aa, Zea Mays
MAISCGNVNCMIFHYNLFMKDEHLHFISERSPHLKRLVMPAWNRITKVGICNAIQRWQALESLTMPTIGHPPYIMEEIARSCKNFTELKIMGSFDQQFASAILQFLPKLKVLSLRCSKVSMDALQCLLNSMEYLEVLNISHCLLLVVAANGRKQVVHELDSQILERASRLREFHYCQSRLCVACQRMVVDEGIMRWYRYEDWFWRRDEVRSLDLQDYGKLFDVGCERLTSVD

SEQ ID NO: 68880 - protein, 256 aa, Zea Mays
MVEELVVDDTPETSRGIIGLCSDPSTGLFYAYDESSIFQVSTSDEGCDMWQVYLDMNHYAAALSHCRNPFQRDQVYLVQADAAFAAKEYYIAASFYAKINYILSFEEISLKFISIGEQDALRTFLLRRLDNLTKEDKMQITMISTWATELYLDKINRLLLEDTTVTIINSVAEPNSSEYRSIVNEFRAFLSDSKDVLDEATTMKLLESYGRVDELVYFAGLKEQYEIVVHHYIQQGEARKALEVLPTAQCSCRPCV

SEQ ID NO: 68881 - protein, 259 aa, Zea Mays
MSAASSRAFRLHGEVPMLLPLIDMCNHSFNPNARIVQERSVNSLDMSVKVLAEKKIKQNEAITLNYGCYPNDFFLLDYGFVITQNPYDQVELSYDGALLDAASMAAGVSSPNFSAPAKWQQDILSQLNLHGEGAVLKVSLGGPDVVDGRLLAALRVLLADDPEAVHKHDLNTLMSLDVQVPLGPTVEASALRTVLALCAIALQHFHTKIMDDQAILGGGPPLITQLAVQFRLQKKFTIVDVMQNISRRIKMLSPQKSTG

SEQ ID NO: 68882 - protein, 877 aa, Zea Mays
MSGDHAKKEMMTGEKPATSHRKAPSGESGNKVKGSPSHDKSRRSGDKKKKMKKVVYYETDSSSPSTSGSDTPSVTSKHHERKKFSKIPLRYPRISKCTPLLSVPLGKPPVFDGEDYCMLSDKMRHHLTSLHASIWNFVEFGAQEPSVGDEGYDSDEVAQIRHFNSQATTILLASLSREEYNKVQGLKSAKEIWDVLKTAHEGDEVTKITKRETIEGELGRFMLHQGEDPQAMYNWLKTLVNQVRNLGSTKWDDHEMVKVILRSLVFLNPTQVQLIRGDPRYKIMSPEEVIGKFVSFELMIKGSKKIIEQGVSSTPDVQPVAFKATEEKKEDSTPSRVPIDASKLDNEEMALIIKSFRQILKQRRGKDYKPRSKKVCYKCGKPSHFIAKCPLSSDSDRGDDKKGKRREKKTYYKKKGGDAHVCREWDSDESSTDSSSDEDAANIAVTKGLLFPNVGHKCLIAKDGKKKKVKSRSSTKYATSSDEANSTDDEDDLLTLFANLNMQQKEKLNELISAIHEKDELLDTQEYFLIKENKKHVKVKNAYALEIEKCEKLTSELSTCHDIISNLRNENAKLIAKVEKSNICDDSIDNLRNDNASSIAKIEKLNASLASLRNENEKLIVKAKELDVCNVSISNLRDENDILHAKIVELNSCKPSTSTVEHVTICTRCRDVNIDAIHDHMDMIKQQNDHIAKLDAKIAEHELENEKFKFARSMLYSGRRPGINDGIGFQQGGNVKLNAPPKRLSNFVKGKAPMPRDNEGYILYPAGYPVHKIRRNHSRKSHSGSNHAFMYKSEASSSRQSTRAKLSKKKTPIASNEPNISFKTFDASYVLTNKSGKVVAKYVGGKHKGSKTCVLVPKVLVSNVKGPKTVWVPKNKA

SEQ ID NO: 68883 - protein, 469 aa, Zea Mays
MAVASRLAVTRVSPADGARPAAAAGRRSGLAVVRLPPTDSRGRRRRRGGAVAASPPTEEVVQMTEPLTKEDLVAYLVSGCKPKENWRIGTEHEKFGFEVDTLRPIKYDQIRDILNGLAERFDWEKIMEGNIVIGLKQGKQSISLEPGGQFELSGAPLETLHQTCAEVNSHLYQVKAVGEEMGIGFLGLGFQPKWALSDIPIMPKGRYKIMRNYMPKVGTLGLDMMFRTCTVQVNLDFSSEQDMIRKFRAGLALQPIATAIFANSPFKEGKPNGFLSLRSHIWTDTDNNRAGMLPFVFDNSFGFEQYVDYALDVPMYFVYRNNKYIDCTGMSFRDFMQGKLRQAPGELPTLNDWENHLTTIFPEVRLKRYLEMRGADGGPWRRLCALPAFWVGLLYDEESLQSILDMTFDWTQEEREMLRHKVPLTGLKTPFRDGYVRDLAEEVLKLAKNGLERRGYKEVGFLREVDEVE

SEQ ID NO: 68884 - protein, 976 aa, Zea Mays
MASSLVTTDRRWGATPARKSSMTVLGKVPKPINLPSQRLENNGLDPNLELVPKGTHTWGSKAPSTTPNAWSSSSILSSKNDGSSTSSSHFNVRPTSGGGSRPSTAGSESLGSPNAWGANSRPSSASGTFPSSHLPMATNRPQSAETRPGSSQISRFADNASDNVKASIRTIDRSESSSRGPGFTLSTGDFPTLGSEANSQRGHSSKGRPTSSLGKEVSQGEQVKSLATGTGEVISPSNNHPVDIMKTEHHAHTGGAPVPATSVPNEGLQQQPYPPNFPMPPLQFDSWRAPPGHPPEGMWHRGPVPGGPYRPVGPPGSFPVEPFGYYGQFPPNSEAAGRQGSGHGGYHTKNDVYHPMPHNSYIMNQPVIPVRPVYQGPVLYDGYYGPQANFNNTNVRDPHFVGGPGILNQFPNQNDRFHPGHPQNRPGKHETVPREQLESDKLHVFHQEHPGSLHDNPDRLGGSREFERNVQPAPPLLPHPDGKQTDMNMRADTRDTFSETERTVVLTKSVPNQRGSVGIDHLSVYENTRSHHRETCDGTLRKKFKEDSSVVLDQHPVIKKNAALIEKIESLNNKARNVYAQNLPEPASSKEFKKHKKTTDVSSNDVISTTCTSDQAVSVSHISAVVQRRPNVTIEGTILGPAHSHLTEFSKAEKLGDSINNHLHRRVDSSRNSYHGPCKDRPANKFGSCGRGESYITNSLPVADLGNDIHHGQQPQIASQLQPVIVPDDMPASLDYESQNKKQDAASNAQNNQRAKMKELAAERAKRMKAEEEERIKNQKAKALAKLEELNRRSSVLQKKSNDTKVETDDAHDKQQIGLDVNAKLDTSTEQHDVVTPDRLTALLPPNDPNHTMVQIQAQSTAQSNALDGGKAHDAHTTSSLVKNTHSNMEHVVQKSISQSHNISMVKTKQGYRKRQVVSEEKISGEKASASVTTDSSVQKNVDVPVDTVTAVVAPHDDPPTQNKKGTRHLRSKKKL

SEQ ID NO: 68885 - protein, 373 aa, Zea Mays
MGFGFVRLAARAAVSRRGMTPATSARRALAPPAVPAEPRCGPHWLVAARGHVGHSHHRGGEDEGETSERIFRLGLAADVVLTAGKAVTGYLSGSTAIAADAAHSLSDIVLSGVALLSYRAAKAPRDKEHPYGHGKFESLGALGISSMLLVTSGGIAWHAFEVLQGVMSSAPDIIGNTLHAHHDHGSSGHHHGIDLEHPVLALSMTTLAISIKEGLYWITKRAGEKEGSGLMKANAWHHRADAISSVVALVGVGGSILGLPLLDPLAGLVVSGMILKAGIKTGYESVLELVDAAVDPSLLEPIKETILRVHGVKGCHRLRGRKAGTSLYLDVHIEVYPFLSVSAAHDIGETVRHQIQKEHNQVAEVFIHIGSLL

SEQ ID NO: 68886 - protein, 470 aa, Zea Mays
MFSPFLQIGVLKDATVAKLPNSEVRLFLEVHFRQENQPIAPWNTKEDILLFFKLYDPEKEDLRYVGNFFVKASGKPSDIVERLNQIAGFLSDEDIELYEEIKFEPVVMCVPIESNASFRSSQIDNGDIICYQKHCLPDSMDRYRYPTVPSFFEYIHNRQIVHFRLLEKPKEEGFSLELSKCSTYDDVVEKVAKQLRMDDPSKIRLTQHNPSSQQPKPHFIKYRSLNYLSDMLHNHNQMCDILYYDILDIPLPELESMRSLKVAFQNAANHEMSFHIMRLPKSNSLLDLIEDLKSKVEISCNDAEFRFFGVYLHKICKVYQPGDKIDSVNDHGPLYIEEVPEDEKNAGPHDRLVHVYHFEYNHHIQYFGEPFFFLIRDGEALSDMKVRIQKRLQVPDEQFLKWKFAHVTFSKPEYLQDSDIVMNRFHKQRPVYGGWEQHLGLEHTATTPKRSYLGNNQNRHSFEKPVRIYN

SEQ ID NO: 68887 - protein, 527 aa, Zea Mays
MILEAIAEIKLKGLISLMCASTSWRGYFANRTSLSGGDDEPPEAFSRCRLAAWRRQYGYGHLTWEWKRGLRSYLHPLLFAALYKTLALLHMDTPWVMVMAPRLVQSLFAAFGDLYLYKLSKLIFNGQVAKWTLFSQLVNWFMFFCITRTLSNSLETVLTVAGLYYWFAAIESSKATSIVSKQHAACEQSIPSRKVALLIAALSCAIRPTSAVTWLYVGLLDFIQMKSKCRFILLDVIPVGAIVLAVTTLLDWWMYGSWVIVPLNFLKFNLLSSGGDYYGTHVFHWYFTQGFPSMIWTFLPFALCGIVKSQEWRLSGLIAWVLGVYSILGHKEFRFVLPVLPLALMFSGYCLASMSQSKGKNQHRKGSLSRLQLSVILLVITNVPMALYMSLFHQRGTEDVMYYLSKEAYDGRVRSVLFLMPCHSTPYYSTLHYNLPMRFLDCTPSDSKGTLDESDRFLTSPSEFVGDVFGNLSAFSHIVLFESEERHVLQLLLHNSFLEMRRFFHSHFKIDRDLQSAVVVYSWRDVL

SEQ ID NO: 68888 - protein, 386 aa, Zea Mays
MTDSTEFKAVTTCNTCKPATISRDDTEAADARSLKNLNSTAPLSNSRTRRNGPHILSWLLPKSKRKPKPDVSPNTVECENMSQLLKDWGVFSLDSLRKEVVEANEHRDAALQEVSEMKLSLGELTAKLVSLEAYCSELKKALKQATSAKNMQSHSKRSARPVSGSRDSFLPVSHEVMVEGFLQIVSEARLSIKQFCKITLSDKHPKLVLYHLEALMNQAMYQDFENCTFQKNGSPRCLDPKQEQQESFASFVALRNLSWNEVLKKGTKHHCEDLGRFCDQKMSCVVSILNWSWPWAEQLLQCFFVASKCVWLLHLLAFSFVPPLTILRVEEDRAFDQTYMEDVLLDKQRSRNGPPPSSSQVKLMVTPGFYVQDRLLKCRVLCRYSG

SEQ ID NO: 68889 - protein, 497 aa, Zea Mays
MPAWWPRSKLRSRSKAKPGAGSVSAASSPRKSADLESPSPSPSPTPTPRDRKAHSLDFPGAAAARGRPAGAAPGHGSVGYKLPTPVEAVEPVGTLYEVVLAAAAAAAAGDGCSSAEESSVCSAASLDEPHYQHGFRPMDPAAFARERNMPSDSDRILNEDKCFMSCSMPREHQKFFDVPAASVRELHLQSDAPSTSEANCSRGRMISGDLFAPRTRSLSPIPKGHAFAVSNGNSREFGFSPRSPVRKMDGLRSPPHPLPLPPASGACSPLHPASGACSPLHPASGACSPLLPTHSFCSPLPSSPSSCPPLPASPTNCSQSQSQWKKGKLLGSGTFGQVYLGFNSENGQFCAIKEVQVIMDDPHSKERLKQLNQEIDMLRQLSHPNIVQYHGSELSDESLSICLEYVSGGSIHKLLREYGSFKEPVIRNYTGQILAGLAYLHGRNTVHRDIKGANILVGPNGEVKLADFGMAKHVCSVYFLTLSVYLPVFNAFSYHNI

SEQ ID NO: 68890 - protein, 129 aa, Zea Mays
MRGNGNGEDAMVVGPVLVSDNSVWVGMRNATTRTSEWKWQNQEWGSLPLRALISSIDFHRPAVHVECLTNATCRYRCPNGWAVPIRPRLASGSCRAGPRAPSEAQARPARLITVNNRVGPVYSPTDVMG

SEQ ID NO: 68891 - protein, 73 aa, Zea Mays
MESGCRANGWSWAAMAPPAMLDMPSADVGGKKEDAGPLDLGRTTRIKARHTPSPNKILVVGIGSDGQRQILAP

SEQ ID NO: 68892 - protein, 149 aa, Zea Mays
MATTTTQASLLLQKQLRDLAKHPVDGFSAGLVDDSNVFEWQVTIIGPPDTLYDGGYFNAIMSFPQNYPNSPPSVRFTSEMWHPNVYPDGRVCISILHPPGEDPNGYELASERWTPVHTVESIVLSIISMLSSPNDESPANIEAAISFYC

SEQ ID NO: 68893 - protein, 1349 aa, Zea Mays
MEAHAPLDFALFQLSPRRQRCELVVCGNGRTEKIASGSVKPFVAHLRAVEEQASAQPPPPAIRLQLDRPAPWFSKGTLERFVRFVSTPEVLELTSTYDLEMSQLEGARKIYAQGGTGDATSGGTGSAAAVAADITKKELLRAIDVRLSTLKQDLAAACSRASSAGFNPNSVSELLLFANHFGASRLSEACTKFMSLCQRRHDISPQTAQPAVSSHWKVFDDGNVRGSSSSDMSIDEPQVDLGESNNKSTVGGSGSQVHRLSNSQGLEVAAEQQPKPTIPQAIDKQEAETDASPAPAAGGLSRRLSVKDRINMFESQKKEQTPSSGNSNSAGTGRVVPGRGEHRRVPSGASMEKLVRRWSSVSDMSIDLSNNESVNINDKKDNGTPVVTPTSTDLEANSKAKADVDSNGQKDLVTSHSWPYQKDNVPMDPTTTDLCPPSTLSNTLAPHSDGAGNDMVINSSIESESSFGKEAGVIQGLTRMSNHATSNVSTRNHLKSSAKPVEEGLLKNKDILTSTSLEEHVRMIDKEITAVPHEVLVASEQIPQNDIRGLHTKDIHTESEVTGRKDQPSRSFGKVSGGVNPKPKTSSNSRANVKGSSGRANVKGSSGRDEITFTETEFRDVSLQRNRLPRKAEDVGRKVTGGSDSDSSGRQGTNLSRQSSITIQELNFQARVMGPGKGNQDRHGELQMKANELEKLFAEHKLISSRRGKPTDVQVDSTRTVSEVKPITVLHETIHTKQVVKESITTNDFDASELLKMVSNQGFNISTPQKLGILSLEESRGKFYEHYMQKRDAKLKEDWKLQRGEKEAMLKAMHESLERSKAEMRAKFSQSGDVSDSTYVYHCSQKIPPSRSARRNNDQGVDSFLVEEELNSDYLSGDGSSRSADSRKHFPNKVASTQKASVGPIHKRSSRTASSGYGNRRNLPENPIAQPVPSFSDLRKENTKPSPGLSRAAARVQQKSFARSKSIIEESKSILKEDQSRRSQSMRKSQIPDELKDISSGNEDIYNWAPSRISKNQSEGAFAYSARRTGPPKPFLRKGNGTHPVIGIAGFQAAAAMMANALQNGDSGDFEDHQDDSPDDAKEEEEYESIEENFRESDFPADSDSENPRVSHEFGNSDDPGSENGDANFSSEAPAIGGTKFTAFTGNVHDPASDVPAPWSSRLPQLSPYMNDNTDGDTFADSPCGSPPWNSHSLDEITDADVSRMRKKWGSAQMPFAGVSASQQPRKDVSKGLKKLWKFGRKTRGGDGLVNDWVSASTASEYDEDMEDGRDLVVGSSDDFKKSRMGYLASYDDFVEDEVFAEQEQSLRSSIPNPPANFRPREDQLTGRAPRSFFSLSTFRSKGGDARLR

SEQ ID NO: 68894 - protein, 50 aa, Zea Mays
MKTLSHVSLTGPHGERGWGMLPHPRPRLPAGGELFPIYIPVGEETSPSPS

SEQ ID NO: 68895 - protein, 90 aa, Zea Mays
MEIPRPRLPVIADVLHSRRLASAPPFGYGCVNPHLKLPKLPVSRSVRLNQSSPVVPARRANRLCRRRTCLPSHGGVVICCCAATSSSSGA

SEQ ID NO: 68896 - protein, 111 aa, Zea Mays
MSASRAENGCSGVCPVNRISGVFPTKSDNSIDGVCPITGKDHGSNLKESRDHGEEKGKGPCVVPAKCPFGYDSNTSKLGLLSFTVCQTLLHESRKSHVYHALKTVHYVVPI

SEQ ID NO: 68897 - protein, 195 aa, Zea Mays
MSTQDVKFIQFQLTVNVAALIINVVAAVSSGNVPLNDVQLLWVNLIMDTLGALALATEPPTNHLMERPPVGRREPLIINIMWRNLIIMALFQVSFLLTLNFKGISLLQLKNDDPAHADKVKNTFIFNTFVFCQVFNEFNSCKPDELNVFKGISENHLFIGIIAITVVLQLNLRFLFPCLEEVMIIVRSRLNVEHS

SEQ ID NO: 68898 - protein, 240 aa, Zea Mays
MVKKEVIEDGVVHFFAVKFLKYFEQISHVYCFATIFDPRKKLDGLQIALEGIGDALDMDFSDAFNHAKDDLFRVFGYYYKKYGESEIDSPAVEFGAEISDTSLTAHLWKRAKGKENVASSQRWNPNAELNHYLSTNFVGTDRALRGEKVKLLEWWRDHKYSFPVLSQFARDILVIPVSTVSSEATFSTVGRIIEERRSSLAPKTVEAITCLKDWNRAEERKQHQLEDPEIEFAAADLDID

SEQ ID NO: 68899 - protein, 427 aa, Zea Mays
MAGGGGGSLSSPSASFLSSPTPTPPPRLLRRCSTKSASRDSPILRPKKPPPLFCAAAATPTPAPAAASKSAGSWRDLCSLNAWVVRDYRRLVDSVGALEPALRRLSEEQLKAKTAEFRSRLTRGETLADVQADAFAVVREAARRTLGMRHFDVQIIGGAVLHDGCIAEMKTGEGKTLVSTLAAYLNALTGKGVHVVTVNDYLAQRDAEWMGRVHRFLGLTVGLIQAGMKSDERRASYRCDITYTNNSELGFDYLRDNLSRNKEQLVMRWPRPFHFAIVDEVDSVLIDEGRNPLLISGEDNRDAVRYPIAAKVAELLMEGVHYTVELKGNNIDLTEDGVAHAEIILGTDDLWDENDPWARFVMNALKAKVFYRRDVQYIVRDGKAIIINELTGRVEPKRRWSDGIHQAVEAKEGLKIQFLVCNANCNL

SEQ ID NO: 68900 - protein, 506 aa, Zea Mays
MFSKGAPESIMARCTHILCNDDGSSVPLTMDIRNELEARFQSFAGKDTLRCLALALKRMPAGQQSICYGDEANLTFIGLVGMLDPPREEVWDAIHSCMSAGIRVIVVTGDNKSTAESLCRQIGAFEHLNDFSGYSYTASEFEGLPPLERTNALQRMVLFSRVEPSHKKMLVEALQAHNEVVAMTGDGVNDAPALKKADIGIAMGSGTAVAKSASDMVLADDNFATIVAAVAEGRAIYNNTKQFIRYMISSNIGEVVCIFVAAVLGMPDTLIPVQLLWVNLVTDGLPATAIGFNKPDGNIMSVKPRKVNEAVVSGWLFFRYLVIGAYVGLATIAGFVWWFVYSDNGPKLPYSELCVFTGTIVPWPAVNFDSCSTRQTSYSCSIFEDRHPSTVSMTVLVVVEMFNALNNLSENQSLLVIHPWSNLWLVGSIILTMLLHVAVLYIEPLSALFSVSPLSWVEWKIVLYLSFPVILIDEVLKFFSRRSPRGRRFPLRLWRREILPKESRDN

SEQ ID NO: 68901 - protein, 54 aa, Zea Mays
MSSQLLRLNAFWGEPASSGFEWHFNPNHNSSVDASSSFGSNLCLVSSKLHHGHE

SEQ ID NO: 68902 - protein, 824 aa, Zea Mays
MDVFGSSSNVVPLVDCPNGFSVPYEVLFRLNSLVHMGKLVARHVNADLFKVLEDLSIDTLRRIFEKMSKLKSTCYEPLQFIRHEAHSMNMRKKALSNKRESGKLMRCYRIHITPSKIYCLGPEEEVSNYVVKYHSEYASDFARVTFVDEDWSKLSPNALSARTEQASQLRGNSVWMFASNSSLTAENIRRWMGHFEDIRSVSKCAARMGQLFSSSRQTFEVSSYDVEVIPDIEVTTDGTKYIFSDGIGKISTRFARQVAKLIGLDPAHPPSAFQIRYGGYKGVITIDPTSFFNLSLRPSMKKFESKSTMLNITNWSKSQPCYVNREIISLLSTLGIKDEVFESMQQDDMHESDGMLTNKEAALSVLGKIGGGDTKTAADMLLQGYEPSSEPYLLMILKAHRANRLTDIRTRCKIHVQKGRVLIGCLDETCKLEYGQVYIRITKNHKEQKYSEQPFFCNDDGKTAVIVGKVAITKNPCLHPGDVRVLEAVYDPGLDARGLIDCVVFPQRGERPHPNECSGGDLDGDLFFITWDDKLIPEKVDAPMDYTATRPRIMDHAVTLEEIQKHFVSYMINDTLGAISTAHLIHADRDPLKARSPECVQLAALHSMAVDFAKTGAPAEMPLALRPREFPDFMERWERPMYVSNGVLGKLYRAALRHEEDAEALLPAGPPSCVYDPDLEVAGFDEFLDAAEERYEAYAERLGALMTYYSAEREDEILTGNIRNKLVYLRRDNKRYFEMKDRIIAAVDALHAEVRGWLRACKEDDASRVASAWYHVTYHPDRRGEKRFWSFPWIICDTLLAIKAARRCRKRVEDAAVPMDCDGS

SEQ ID NO: 68903 - protein, 279 aa, Zea Mays
MKNDLQVRIAKEARSNAILQASLERRKQALHERRVALEQNVSRLQEQLQAERDLRAALEIGLSMYSSQFSSSHSMDSKTKAELEEIALAEADVARLKQKVAELHLQLNQQRQHQYGSSVDANDCPPHLPNHLSQNTVQTGFDRTVAFCNQEKQRNEESLPCTSHWRSIKQHVLSQDSSRPFSRKHSSDTSLSDSMEASTSVLAEGGPLLVNIARTTEGVEYGRPPTVPSSTLVELTTRLDFFKERRSQLMEQLHSLDLGHGSASHGFPYKSSSPWNNPR

SEQ ID NO: 68904 - protein, 994 aa, Zea Mays
MSGSPYQPSAERMDQNPSTVAVEPISRNNGFGAPSASDSIKKKKFLSTNDEESIAGSDSLDTSLSGSDSKSLKFQTKVCLSNDLPRENAVIYSGLGLDISPRSSMEESPNGLGGLSPECSNVPFESPRTILQVMTCLPVPGGFLLSPLHGNLLQLRNKVAPVLKNLETHLDMENVSRALEGRSQSFHPLGLIRGNVTKQMRPCSKKKVAVDTKTSKYKGDASATMNNEVNIQVPASQKEKMNTNNKNEFEVGSARKEIPASVKHGELYMQPASSVSTMNAYHVPAPVVIEDHWVRCDICHKLRLLPYGMNPSMLPKKWKCTMLHWLPGMNRCDISEDETTGALNALFAIPATATTLSSGSPHTAVTGGIMERNKAYPKLKTKIRIDQDEQKSYKKTKIEAWHQIDRGQDHRCDSDGVEVPDEHKALLAKAKAMKGSHETDDMSLCKKNIASGYDSSENVNNVNALDVPFHSEKKEHPSDVDILDLSCKKNAVKKLEIQLNSLHCISNGPQKNLKEKKSNKLKSKEMASKEDSRHGKVQHADAVLSSLGHLNYELGADNKFVTGKESLSEQLETLPAKQVLDLAEAPGRDVAYLQSSTTVSSSSSKISSSRRNTNSQEANDSPIKSASSLPLRDFSIKMISGNRKDGTVDASLGNTHNLARYQNSEVIALNYGQQAGNFEGDQVAGEPNFHGSLQGISDSNIKEIPQSAGAQVSNITGFGRSLDNSLPEASCREDLTVNDTVVGRGDHQLCSGEQKDFNMEVRLPLPDQHCFGRINTESGSVRHESKNIEVRQGSGTAQRLGMLFKKEKSHLRILNRDIQNHVNQVVNFPLKGGKQKVCPTSVKSESLKMKAKLVRFNVETGVQHGSVKQVTSSTLDTSPMRKDGSMITFALKEARDLKHKANDLKNKGQELESTGLYFEAALKFLHVAFLLETPSFDISRQGGGGRSMKMYSETAKLCNVQVCRSCLPQGCILQTPYCYKRSTGTSGSCTDNPR

SEQ ID NO: 68905 - protein, 323 aa, Zea Mays
MYTCFQIRGFAWPAVLVGLVAQSASLGMKDSWGPLKALAAASVINGVGDIFLCSVCDYGIAGAAWATMVSQVVAAFMMMQNLSNKGFRAFSFTIPSVRELLQIFEIAAPVFVTMTSKVAFYALLTYSATSMGAITLAAHQVMINVLCMCTVWGEPLSQTAQSFMPELVYGANRNLTKARMLLKSLVIIGAITGLTLGVVGTLVPWLFPSVFTNDQRVIQQMHRVLAPYFSVLLVTPSIHSLEGTLLAGRDLRYLSQSMGVCFSIGTLLLMLLRSKGSLAGCWWVLVLFQWSRFGSALLRLVSPTGMLFNKNFNQVEYIEAKTT

SEQ ID NO: 68906 - protein, 386 aa, Zea Mays
MKAVGYSPYDSSAQNRGLRGRSFSGNVVASAGAFPYMRANNDLESEIHRVEQDAYTGILRAFKVQSDAISWEKESLITELRKELRVSDEEHRELLNKVNEDGTIRRMRELRQAGGSPSGLHHGNMVLYGAEPGSTTKRQRASHSIPLQSAGLQSPMMPSHSVSSAKWGPLQARGTKARTPIPLALPSVDPSSLINHKVYTRWPEDNNFYEATITRYNPVTGEHGLVYDMGTQAESWESVRLCDMAPEDIRWGFDGHLSNRDVWSPSGPMLMRHMTNNGAMAGSIKGRGRLSINETIKDYAPPENGTNRNFDHVDIPNTGSVVMEVKRVLFNPNMPEIEKARKLLKDQEQSLLDAIARLDEASDSDNEDMAMEGRMGSAGERNGITT

SEQ ID NO: 68907 - protein, 118 aa, Zea Mays
MTVYVEVKEFHPCVCMDLENADLRMMRVMEAYQVKEFHPDVCKDPEIADLRMSERWRSIRECSSLLSIVKHVLQYPLPTSSCICCLLDSLKHRVWRKHNIYRMDYDLLVHVLHIDLSF

SEQ ID NO: 68908 - protein, 355 aa, Zea Mays
MEDKGSLDLANNALARATHVFVKKQPEIHLFSARFKELNGDISGARAEYQHLYSDLCPGFLEAIVKHSNMEHRLGDKELSCSVYEKAIAAEKGKEQSQLLPTLLIQYSRFLFLAIRDLEKAREILTVLHEQLNVTKTVLEAVIHLESIFPCEKRIDFLDSLVEKFVTPESSQGEVASLVDKEEISSIFLEFLDLFGDAKSIKKALTRHTTLFSCKRSILPSKKRKADDTVVSDRDKFAKTVVTQSATGTDPNASNPPVWPATSEASGQQWGASYAQQAAYPAYGTYDYSHQMPQPAPQAAAYGAYPPTYSAQAYTQQSYPQPAVIPAAPVPAPTAPSAYPQQPAAAQPYYGTTYY

SEQ ID NO: 68909 - protein, 468 aa, Zea Mays
MGCVHGRPPASSPDHPPQLPEPPAPAATQEAAGKAEQPAAPAEKPAWRERRSRSSRNAPAPSFANRARGEQVAAGWPAWLSAVAGEAIDGWTPRRADSFEKIDKIGQGTYSNVYKARDTVSGKIVALKKVKCYMHQLLSGLEHCHDRGVLHRDIKGSNLLLDNNGMLKIADFGLASFFDPDRKQPMTSRVVTLWYRPPELLLGATDYGVGVDLWSAGCILAELLAGRPIMPGRTEVEQLHKIFKLCGSPTEEYWKKSKLPHATIFKPQQPYRKRIRETFKDFPQSALQLIETLLAIDPADRLTASSALRSDFFTTEPFACEPSSLPKYPPSKEIDVKRRDEEARRLRAAGGRANGDGAKKTRTRDRPKAVPAPEKRRFITHANAKSKSEKFPPPHQDGAVGVPLDASNHMDPLYEPPDPSSFSTVFTYEKGAVPTWSGPLVDPAAVVNQKGKHKSGRSSKQPATARAR

SEQ ID NO: 68910 - protein, 590 aa, Zea Mays
MGGVGAASLALLPLPLLLLLLVRAEASALHGTILPNPAPSPSSPPEARSFGPRISPSYPPRALSPGSPDIDVRSHSHKPPHHRESNQGPSPSSAEGCSSYICTEPLTATPIGSPCGCVEPISVIVDLDLAPYLLFMSIAELEVEVAAGTFLKQSQVKIMAAVASIQDDQKTRVTIYLVPLREEFDTYTASLISDRFRDKKVQINSSIFGDYKVINVSYHGLQSPPSSVPGGSDPSGTEDPITAEVPDQMKKHKKSDILIVVVALGSSLGLLLTCAVVLILLVRWKKLGRLHEDMNPATTPTVNRRYGARSTLSTGMVSSASASAFSTVATCTTSVKTFSLGQLQKATDGFDSRRVLGQGGFGCVYHGTIEDGNEIAVKLLTREDRSGDREFIAEVEMLSRLHHRNLVKLIGICVDRSKRCLVYELIRNGSVESHLHGADKAKGKLNWDVRMKIALGAARGLAYLHEDSNPHVIHRDFKASNILLEEDFTPKVTDFGLAREASNATQPISTRVMGTFGICNDGSSSCEERRLQLRGCLAGTSIRKEARKHLRVEGSREPCDLGPSSAKPQGGPGEVDRPFSGRELQLRQRG

SEQ ID NO: 68911 - protein, 1946 aa, Zea Mays
METAAATARPGAARKRRWNQSQPCQGEGPSDLKFARLRFDGDGGAKGAWEHLDLVLSLQSKELSLERKIELAVEFLTTLPNNSSCSIQLLRLVSFIGNWLQSILNFPENSKKILHIFDPALDSRCWAILRVCVEKKPSISISLNLLKSLSRVASHGLGRVDSNTSCPDNESIELFEQVFDCMSLLFSSNTRAFFNAGVDLWASCAIEVVNLAQKVSAKKDNFCPVLQKLANCLLGQFACFLRFYANPKNIFHAFVDKVLGPLLELLVLLNSQAHSSEHKQTGTMLKIVEDVFSNGLFHPQHLSGYFGLRSLNKSSAAKDIKGSYHRHLFQRFKGIKTENKAVLLAGFGYLFQLFVRRARNQRTTVAPSRTTLGTLHKSNDGSEEPQHRESLFEVFIMFMEPIVLECKSYSQKDFSKLGVTRLVEVHCMLKSINVMLITLIEEKIYVPTEDTLEGSHFNFLQDIYSVLILISEKMYKFWMSAVHLEDVNIKKIVPLMFAEIISAVGNFLEIEYKVLGDDLVKLWLMIFALSAINTSSKDIEPCFLLASKISSLSAQVICTFSELRQVSRSIFSLCDAVRAFRVEGPDGVHGSFSVASLSSQECLGSLTTLLSSETLMGAIRTSIKSMPQGQSSRCIEELTSDLTETLNWMADCSFEDDVSKLREPSIARKSIFCQKAELLGRHLSEVYASILDSITVTVSNSTLVGKSVERLVNAVRRNFSHLVRNKSKNINGFISSIMGKNVSKKLHANRQKIPSFSWIFCLFCRLYISCRSLYQQSIGLMPPDVAIDATKLVGNPFIVCSGKEWTNPTNILGKGYFALIDENSNSLLDVIESLSESLSTNCASFAPLVYIFHVMVLQRLNDLNRQIKAFQFLLEDDAWQIDNKDIGNTRLLKESCSLEAAKLMSFVMNYVKLLSSGETGPFGSYDVSSSWDLSLCSLDEGSFPIATWQLLCENIDVWSSHVSKKDLKNFFSNLIRFSFTQKRSSLDKENNGTQSSGREMTLHSVSIGVLCDTIIYEKKVILKNLASSFCHALKKSFSFVTNSDGDNVFLDTSPDLMETISNLENEKLIGTGSGATHAHCLDKHWICEDFLNFFSAVPGFHANSKAFIRLINYILHLERLLLLKLLGLRCESCNPMKLLRLFICCRRALINLILKFGKECPEARQYLSFSNKNGNSYSLVWFLRSVQEIVGSSHKIFDECTDEVNRLMFSLLDKTSELFSTLASLNSSVYLFDLKKQIESSLDGSPIKKETSEHNDQAFDIVEVSALECVRSMAELLQKTATGIPVTIKDSKCVIKIEDCRNTVCWKRLSCSMSCIGGFLQGLNSALESTFNDHPIASPEDRKMLLQYCSRFSSYVAKFGTFVDICVHVLFMDNKDSASIDLVSVHLPQELDCANGFLNIEAIMDELTKCGSHGVDLSKIQYMENVLLENLLKGECPLISFTLREIYSISAAIIKFHGYLSFSSDVSRQTCSPVEQLSLGTMLGIAFITLQKVADMSSWPHMFCLVWIDGVLRYLEVLGSAFTLSELNISIELYTQIINALLRAVGKCILLQQKNATLPTHEIGSSTKTLQLQNASGYAFPKDFIDTQNRLNSLKSRLRLVLGKFVSIASNTHLNAALQVIERALVGVNHCSHSIYQIYTGNPDGGTVSSDVAAGIDCLYMILDFVPGNKRVFKRTVPGLVGALFNIILHLQSPHIFYSQNLPPQGSVFHPDAGATVLMCVEVITSFVGRHSFQIDASHVSQCLLVPVTLFKEFKHLLAKYCNQSVQHHGDHAEYILDRQFSVDIYAACCKLLCTTLRHQQREIGWCVALLEDSVSILLGCLESTDSKMINVAGYFAWNMEEALKCASFFRRIYEEMRQQRETLGKHAMHFLAGYISMFSGQGPFQTGITREIDEVLRPGVYSLIDICEESDFQQLHTYLGEGPCRTTLADLVRDYKLHFQYQGKI

SEQ ID NO: 68912 - protein, 149 aa, Zea Mays
MEDLVSSPSFRSVLSSSSEGQAQSGESSWTDYFVDFMLSEEERKRQADASSYSYCATEDEGGSKYGGDGSNRDEEEEEEEEESMVSDAASHAPTTAGATALIPAGRYKELKKLKKKPFGKALDHDGSLEDTASSPVNSPKCCVTAGIEC

SEQ ID NO: 68913 - protein, 316 aa, Zea Mays
MQSNPLLASRSCTDRLQRPTPRRRIRRRRRRHVLFAPPAVSIRLHGLHPAAAASSSSSPPVVASSPSPAAALSSSAPPTQNRPETWQDAAGGARRTRRRRHEVPRPRAVRRRRRRRQAPGRDEDGEAQLGHPEPERQGAAGAARRRVPLLPREPPVRRRSAAGQGHVPAPPRADGPAPRVVRAQAVAGRRGRLRPGRQVVSRVEGEEAALGPRLQRLHHPRLPRPPAHQPSEQDLRAAAPEDSWDHAAEPGRGSPGRRAQGAARRHPRREAEEHDGFLRRHRPPRHAAVLRIAQELVASSSPSPPAAPPGGQGASI

SEQ ID NO: 68914 - protein, 234 aa, Zea Mays
MAAAASGGDTPKQLLSIIRDFAYEKSHGERRVSDLRRRLADARAAADVAAAELDAAKRAREAAEQEFRGSQVQDAIAADSILALEATISCLHEEISKASTDLDALKSKEDSEREDFISKMYEMNAKIRQFQQMVSLELAEYNHCELPSTDGEHVKDKSKTVDSEGISEELSDKVSNIEAEVQLLEEEYKKDLLYHDKVRQELAEVQAKRALMEAVMEETKQLQELGEYPEHTEL

SEQ ID NO: 68915 - protein, 1293 aa, Zea Mays
MRQALPDLFDAQPDLLFHLVTMLNPSILQANSVPVYSVMQEPGNFIITFPRSFHGGFNLGLNCAEAVNFAPADWLPHGGIGANLYRLYRKAPVLSHEELLYVVAKNGVDAESLTHLKGEIKRLFINERRRRVELWINGTVKSSLMLPRINPNFIGSEEDPTCIICRQYLYLSAVSCNCRLSSYVCLEHWKHLCECSPKKHCLLYRHTLAELGDLVCEVSLVSPQRDNVMQNPHLLNDVYVPSKKVKDHYILYRQLAEDWVSNSEHILQMPFVERSYATALEEAEQFLWGDHAMDSVRNITVRLTKAMKWALGVRKCLSKIQDFLKDGCSEKVNYVEIEELVATKCAPCCEPSLTKLQAYAEEAKLLINEVNNALSSFLTVDKLETLYSRVSEFPVKLTESSTLFWELSSAKSWLKKASDCLEQNKLGIIDIDVLNKLKSEIIQLRVLLPEIDLISKLWKDVESWQTRCQLYLQDFPDLKELEGFLLAADGANFSIPELNILKQHYSNCCSWVSRAKNILRKLYATSDYHNAVEELTGILKEAELLGVKVDELPIVEKELKRSLCRKQASEALATVMPMEVVEEILKEASILHIEEEQPFDDLSRMLKEATSWEEKARLILERSASLSEFEDHMRCSEGIRVILPSKLHMKAEVDIAKLWIDKCQAYLRPGCNKLAFGDFLKVDDIKDLINQPANLKVILDTSELNSVLNNIEKWEHSSLSLLNNFRALLHLNSIGSTVDTLQRKLEELQGKMNTEIEVGLSLGFEFKVLWELKDSSLMLRWILNALSLCCMIPLLQDVDRLIEEAVHLPASLADCSLVTLLMRALSCLRKSLILLPGSGTSAKSKLEDVENILAEFKEVDVPYPIMTAKLEDAVNNHNSWIEQCNTFFMLSDGQSWAMLQNLRDNGQSVAFDCPEMDKVVDEVKNVEEWLNQCHCTLLLDGNNSSLLSILVKIRGLLDDVCTLYAEDCMKLRLCAVCSCDIGDRLASRCVTCQDWYHGSCVENLSATTQTTIEWMCSFCSLLQSEDQLKNQLSVKMSKGNCPALAALDELISSAKGLYTGIEEINLLKEIVDKARNLNAYLMQILDDSDCYHGEDLTVIFKSLLVALKATSASGLYDDNVSCRIESVLSRYLWKKQIHKLLYGGKKSSIQEVLCLDEEVIPFLFCVKTRVVFKVISRCSVMGKVVVRCGSFPIHHIRPFANESDTSYHCGGLNSEKTNRENSLFDTQKTCSSQFSTLKLLLPCISSIIHLAQKLLQCPRPFRGDVPRTHAKIFPTLKQKSGWRGPMFAWTYYQ

SEQ ID NO: 68916 - protein, 150 aa, Zea Mays
MERWKLGPSRWESTMEHGELRAEANSARRGTTEHCACVQGEREARERAEEERERESAMGKEQSACTEEEEDLAADTHPGEKKPGLRRGSWRRSAGSAAARRESRDAQPWEQWSAQGRALEKERAAELGTGQRNSSRQGREHAPPRVSWRP

SEQ ID NO: 68917 - protein, 360 aa, Zea Mays
MWRRGANLEGATANFVETEQLVEYEDLTSSFIQLRGSIPLLWEQIVDLSYKPRLSIIEHEETHKVVQRHFHDLSQRYGKIIVADLTDKRGDEGDLSNAFAAEMDRIPGVRYIHFDFHHVCRGGNFDNLQALYNQIEEAIHKQGYFLMNTKGEILLEQSGVVRSNCIDCLDRTNVTQSFLARKSLDSQLQLMGALLSSESISLSDNIHDTFKKLWVEHGDELSLEYAGSYALKGDLVRYGRQTLPGLIKDGMSALSRYYLNNFHDGVRQDALDLISGYYTVSQGSSSPFHNGVDSSSYLPVASAIIVGGITATTFTLSQVGRNAQHLISSIICAGLTVGVVALVKANGKQFCSRPRLCGLI

SEQ ID NO: 68918 - protein, 352 aa, Zea Mays
MAQACKKRRGVYISSESGDSDTDSDVEGSKHSQKSGVTSISTCEHQSSYNLKAASMKSSRMIRLCGNIVRKLIDHKCGWLFKEPVDPDLYGIPDYFDVIRSPMDLGTIKNKLTKKKYVSIEEFAADVRLTFSNAMKYNPPGNDVHIFAKELNEMFDSEWESVERKFRGRNLGQDQQTMKAIKVRAMMDSKSTVARGPVACSNPKTLVARGPVACSNSIAKKTLTDALSSKVKIKFSVRSSAHTSSKDILVQAAGSKEGSLNHSVPTGNKEASSNCTIPIAKEAKISRAREIERCSGSIGKQSWSCNDTSTSPLASSVQGEEYRPCEIAIGKGEAGKEAARRESKDRGPGEGC

SEQ ID NO: 68919 - protein, 789 aa, Zea Mays
MALRELKSDDGDGSSDDDVTDQICALCDDGGHLLSCDGPCKRSFHPTKKDGRESKCESLHYTSAEVKRIGTYLCANCKNKQHQCFRCGELEPSHGPNAKVFQCNQASCGYFYHPKCIAQLLDPNATDGELERRIMSGMSFPCPIHWCFKCGHMENKAQRALQLAVCRRCPRAYHRECLPRDLSFGTKDKDGNQRAWKLSDTIFIYCLDHEIDKDTGTTSRNHIKFPATPEYTKTKGLGNSKGRMTGKRRKNKRRKNTDQSTKPTDLPNRLCGAESEQADNVGAKSTLPQIVVEPHCAAKHLKGDPQIAKQGVAARQNGAETMKGHENQFGISFCVASTETEKRVTCLAQRGTCLGTQYDGPSTKGMYDCSVQDTPMDDDVELDNVACIIAVDKYVNGRGKTQEDYTRKEAAQRKDSSENQGQNDALELDNLRMEMQADERPLEPGNKRDRKWQKNVYGLGSASGQKETLSRRENPRSDRGMVHSNDSKTIYYRKGGTEVDNVDDHPLEKQDHQDTSSDGSKKRSRPVDNASGGNRPYLDENKKRNLREDGRYAHYEDWRSERNTAADTSGYKAQSEEKPVWTNTRTGSREHSLDRQRIECGDSYRGTYNNRQRHEWLHPHASGNSSRIGWDDRRQWSSSRSPFPSAEFGGDRSCSRAHPRGSKYRTGGRHDHPQYLGLGTPQHGTSRPHHTMGWDRDTFHDHQHGRRPPHHTMGWDRAPFRDHQHGEYDDSRYGEYDATDNGPDSAHRPYTAAGVAGRSAPSYQLAGGYGEGSRAWRPVTDKYAPWPLP

SEQ ID NO: 68920 - protein, 67 aa, Zea Mays
MQWRGRFISKQEATMESGFPLYLMESGFGASLFSCDFGIPAPFPFMEGMRCCWSAHWNGTDIDRTFR

SEQ ID NO: 68921 - protein, 216 aa, Zea Mays
MPQQGSTDHNNDTQLEADKASHSRSSSGEGSINSRTSEGSCQRSPANQTFVCKPIASTFAEPQLNPEEFNKEPFQEPQLPLSRMLIEDSGSSKDLKNLFTSTSDQPFLAPPNNLVPMKHSGSVTIKASFKEDIVRFRFSCSGSVIVLKEEVAKRLRMDVGTFDIKYLDDDHEWVKLTCNSDLEECMEISRLSGSHVIRLSVSDIATHFGSSCGSSG

SEQ ID NO: 68922 - protein, 546 aa, Zea Mays
MCENSRNMDHLHMIFRLVKGIILLNDAGIFDKIFSDDFILDIIGALEYDPEVPSVQSHREFVKNQTLNEAIHIGNVSVVSKIRQTYIVGYIKDVILLNALDGPTLSSLNSIIERNKPFVVSVLKDDASFIHDLIARITSSNTSAESKSKLVLFLRELCIISKSLEPKVRSHMSRYLIDVGALNIISDVLQSQDKELFSAGANILGYFVDLHPDLVRTFIANHEENLEGSSLLEFLVQGMVVDSANEMLYQSCLKELLGSSDTTVNHHDVVLRLFFDKHLQKLIDAIASSCAPKGIARSTSGLAGVRTTVEQHSAKPETLLKICELLSFCALHHTNRMKIFFSTNAMEKILTLTHRREKVLVLAGVQFVRIIIGRKDDFLVDRVIKFNLLKPVIKAFDENEGRDNMLQSVVLELLEYIRKENIKPLIEYVAESCWGQLVKFERLQSIMAFKLKIEESAETKQSTSVVDMRMKKADERGADKRQEGYFEDSDRVDSSTPTMHSQEQSIPARKPENADGCSKDKEGPPSPSRSTKNSDGSGEGDGSRGS

SEQ ID NO: 68923 - protein, 541 aa, Zea Mays
MLRRGVLLLAAILIAVAHSPLAYASEAEHKYKTEEPVKLWVNKVGPYNNPQETYNYYSLPFCQPSENPAHKWGGLGEVLGGNELIDSQIDIKFIKNVDKGAICTIELDVQKVQQFANAIENSYWFELFIDDLPLWGFVGETDKNNEKKHYLYTHKNIVVKYNGNRIIHVNLTQESPKLLEAGKKLDMTYSVKWVQTNVAFARRFEVYLDYPFFEHQERDVNEESGWKLVHGDVFRPPRGQVFLSALVGIGTQLAALILLVIVLAIVVMLYVGRGAIITTFIVCYALTSFISGYVSGGLYSRNGGKNWIKAMILTASLFPFLCFSIGLLLNTIAIFYRSLAAIPFGTMVVMFILWAFISFPLVLLGTVVGRNWSGAPNNPCRVKTIPRPIPEKKWYLTPSVISLMGGLLPFGSIFIEMYFVFTSFWNYKVYYVYGFMLLVFVILIIVTICVTIVGTYFLLNAENYHWQWTSFFSAASTALYVYLYSIYYYHVKTKMSGFFQTSFYFGYTLMFCLGLGILCGAVGYLGSTLFVRRIYRNIKCD

SEQ ID NO: 68924 - protein, 666 aa, Zea Mays
MGLLSVSRWAFEQGLVCSPNNWNCMEKLLEVLISIRDEVACLSVANLILNSWPSHHRALHVKKTIECAEPVPFAPRGIDILEPKHAKLIFSNKRKSVDDEICQEIGTKKSKHSATLQLNEAKWLALLDGILSLISANTEKAGEYNCSNTVDRCSISEGSAKGLAYNIIDVVISTDTLKSVETAGGNGNDSHHGEILPYDCKATVKEKDGNSDREHPHERRSTRLERLRSRKSGKDENGSDGKDISHAMTQFLESFILKGPSPVEKAYCSGNADASNPDTHNYTSNEEANDLKQFLCKISKNFGPHHIGYMLLEEMAHLKVPFQDYFVKLIELDKLTRGWAEDRSASCNLFLAELYYDRALCSGSPPTSSELSDSSYHLCKIIESVALELPFNISVREIHSTNLDTESSRTGESSSELIERSHENGHINMLNDQKSKHDSSSNMNCAFWIRFFWLSGCLSLSSDCKEKAYKEFNIALSILKNSNKTKSYGEVILLPHTKLVKSLTTDRILREINLIRLESLLWNNDENINKITHTEFMQLLPPLLLSTKDAYVGNAYGPQRESENVISLELSALDVLISACEKAKPMNIQVYLDSHRRKIQVLTVAAGMVGSVTPLKAKGSSNVEFVEAMNRNRLENVVEAVKDVSRNASKAKDIIDQCDNSRLLRT

SEQ ID NO: 68925 - protein, 784 aa, Zea Mays
MASGGGGIRATTSGRMKSRGWGDSSDDFGTPAIALRRGGDCSGTASSDSSAVFFAVAFCAPSPGLSVTAAAAMVEMRQRRKPLVLASTQALLDSLPGDRPPPPPQKPVRLKAGVLRFPSGGGGAEFGELASFVGIPAPALRRLAVVTGTPVLVKNTDNNVGRIVKAVLFGNPSLDKSCSEHTDQVVSASLSGHAMGFLPCRTFPAIGFTSMDEDVGYVSPLLAFNLGLHVSCLKLLIQREGQPFKFCSRAEEIDATASSGSDLSLHLDLLPCPQVPKYALHLRVSVVRIPDCGVLASLKIYSSFGGSEYQDMVDQALNEYFKFDRFLARGDVFGIQNSWKCGSSCCLACNKQDNKLNPRNMIYFKVTGMEPSDEPILRVNCNETALVLGGAASAAIPPYSFFASSGNSVPLHSEVVEHLASVIAPALCPSDILPKIKFSTFLYGPPGCGKRTVVRHVANHLGLHVVECSCHDLMTSSESGAPAALATAFKEAQKYSPCIILLRHFDAIGNASSNEGPQSEQSGIASNIESVIKQYIGQRWVAKDSLPGKDVNGSSYLVEPECVSSLQIILVATADSSEGMQQSIRRCFRYEIDMKTMNEEQRNELISETLQGIPKVADESICDKFIKDLAAQTSGFMPRDILALVADAGVSFAHKIAAGKDSKAISKHTEVLPESSSATQNEEHHFSKEDIMSSLERAKKRNRAALGTPKVPNVKWEDVGGLEDVKKVILDTIQLPLMYKHLFSSKLRKRSGVLLYGPPGTGKGCFPGIISFVPEAVSQLLTSL

SEQ ID NO: 68926 - protein, 104 aa, Zea Mays
MQARCSLQASTLKSLHLLQIITCSTQELDLFAATSLAFKSSLTPFRVEMVSWQVDSSHESISFLLTSRARKFCALTNLSCSSYKRSSLAFLITYSYHSRHQLIH

SEQ ID NO: 68927 - protein, 432 aa, Zea Mays
MTVTWTSGYDITEAVPFVEWGEKGGRRLLAPAGTLTFDRNSMCGSPARTVGWRHPGYIHTSFLKDLWPDSPYTYRLGHRLMNGTRVWSKSYSFKASPYPGQDSLQRVVVFGDMGKAEADGSNEFSDFQPGSLNTTYQIIRDLEDIDMVVHIGDICYADGYLSQWDQFTAQIEPIASRVPYMIGLGNHERDWPGTGSFYGNLDSGGECGVPAQTVFYTPAENRAKFWYATDYGMFRFCIANTEEDWRPGTEQYKFIEQCLSSVDRQKQPWLIFLAHRVLGYSSCTYYESEGTFEEPMGREALQELWQKYKVDIAFYGHVHSYERTCPVYQSQCVVDGSDHYSGPFQATTHVVVGGAGASILDSEFTTSKIQWSHFTDFDHGFVKLTALNHSSLLFEYKKSRDGNVYDHFTISRDYRDILACSIDNCPRSTLAS

SEQ ID NO: 68928 - protein, 142 aa, Zea Mays
MDSRAFFLSGRGRPPEGSSRQPRLLTFALEHGGGRGRRSCLLSLVGLIFPRLLVPRGIVAKLYVQKSNFAVRRLSCYPSLGRHQTSEVATEYLFPEPRSGGKKAKATADQAPKIRVSSGHLWREWQVHRRALHTHLGSAVCG

SEQ ID NO: 68929 - protein, 228 aa, Zea Mays
MVLIEAHKEVGNKWAEIAKRLPGRTENSIKNHWNATKRRQFARRRSRTSSKAPKPGTLLQSYIEGLGIVGPSDKSAAPLSEPTLSPEAPGAKSAKTGGTTLPEEHSPPSNMLDSQGVLLPSEELLAPICDELLDGMCGGLFDCTNEDAFFRVCAVDDDIDVSYIFDHAIKVDPEIDMEMMMMWDDDALACTAGPAAGTAHVETVHVKEEMDLMEMVAATQNCGEAENH

SEQ ID NO: 68930 - protein, 1056 aa, Zea Mays
MQSMESLAQLEVLCEKLYNSRDSAERAHAESTLKCFSENSEYISQCQYILDNASTPYALMLASSSLLKQVSDRSLSLMLRLDIRNYVINYLGTRGPKLQNFVIVSLIQLVCRITKFGWFDDDRFRETVKEATDFLGLASQDHYFIGLKILNNLVTEMNQPNPAMPLTLHRKIAGSFKDQFLLQIFQISLTSLNQLKSEAPDDFGHIPLDLALKCLSFDFVGSPVDESSEEFGTVQLPASWRPLLQDPSTLQIFFDYYKVNDIRVSKEALECLVRLASVRRSIFVEDPARSQFLSHLMLGTKEILLTGQGLADHDNYHEFCRLLGRFKVNYQLAELLNVEFYGEWIGLVAEFTTRSLLSWQWASNSVYYLLSLWSRLVTSVPYLKGETPSLLDETVPKITEGFITSRINSVQAILADNSLENPLDSVEVLQDQLEFLPFLCRFQYQSSSLYIINIMEPLLQAYTERSRLPAPGDADELSVIEGQIAWMVHIIAAIVKVRQVTGVSQETQELIDAELSARVLQLISVTDTGAHTQRYQELSKQRLDRAILIFVQSFRRSYVGDQAMHSSKQLYGRLSELLGLNDHLILLNVIVGKIATNMKCYAESEDVIDHTLSLFLDLATGYMTGKLLLKLESVKFIIANHSPENFPFLAEYKCSRSRTTFYYILGSLVFMEDSPVKFRTFMEPLQQVALNLEATPDAAFRTDVAKRAFVGWMRDLRGIAMATNSRKTYGLLFDWLYPSRMPLLLRAISLCTDEPEVTTPLLKFTYEFVLNKAQRLTFDSSSPNGILLFREVSKIIVAYGSRILLLPNGTDIYGSKYKGIWISLTVLSRALCGNYVNFGVFELYGDRALADALDISLKMTLSVPLSDILAFKKLSKAYFGYMEVLFNNHIKFVLNLDTNTFIHIVSSLESGLKGLDAGISSQCASAIDNLAAFYFNNITSGDSPPSPASVNLARHIGECPNLFPQILKTLFEIMLFEDAGNQWSLSRPILSLIMTSEQMFSELRAHILASQTVDQQQRLSQCFDKLMTDVNRNLEPKNRDRFTQNLTAFRRDFRLK

SEQ ID NO: 68931 - protein, 77 aa, Zea Mays
MAIQTRRRKMVLRNMMSSFIFMFYYIWVLLLISYKRKCWKIERRIRVRELRSKMVLRKISSRRLHCAKSTTKHRRIF

SEQ ID NO: 68932 - protein, 1095 aa, Zea Mays
MMNSRCSRICRNMRGITSYWKQQRILMNPSLRYFRDSKIGVNIAARGENRDLLNTDGERNDYDWLLTPPETPLFRSLDDEDQHIGMAHRGRAQVKPISISRSSTMENTQSFNRRSASPSRLSPAPRSCSSTMLTRIRSSNSSSRCSPALHLQPAAPSRRSSTPPASRTSTPPQRSPSPASRRLSTGSSDPILNRKGGTSPVKTSNRPSSPKLQGWQSSDPGFSFDAPPNLRTSLSDRLVSHSRGGSPSSFSGLDMNWRGRRQSVSPTPSRRASSSHSNDRFSSYSKASATSSAEDDLESMQSVLISYSSSPALRKNMPVIKSRTIASPKKPSKSFSPSSGPKRSFDSAVWLMDRRKAPQDKFRPLLSSVPCTTFGVGKGDNVHSSMLSHNSSLTTSSNLSSDHGVTFSPCMGNEQGPSDIAGDCEATPTYSLSATQSSPKSPSTEKNAESNMEDLNMERSRIVETSGNVASGSKAGLTKMATCTRCEKLFNAIKDDGEIDLCEECGLVDEVLFVNPKIETLEEHQKDHKTRISKPCVALEAPHITPDHGEDTKKSFLDSQLLNDEPPADCLQKCPQSQSTIYTTDRMLLMLHGENVNENLRPDDVGNSSQGSSLDISSHQCNINNYQQSELASVVECDNLRDQTANHQNEVFQRLPGSVYQSIEFASNTLTYDSCCKQGSAGHSNLKVENTEGAGISVLLQKSSSNKWPVIEGRPLAGTNIICSEPYYTRDGVTMLKRTIGWDSSSASSIDQGSTRQSGHLEHLKSSNRHDFEKSQISSTMSCKSIASMSDMSSSNCSVSVCPRDDAIADTGFLTDNSESSAPRSIICTEELNESCKYTLSSAIECWSAAQAIVNVGIGSTEDVVIQKLCTGRMVHKDYTSDNSCSSDTETCSNISLSLAPEERCIQKIEEGTSVGTPEHPDGDCGISNYQMQHETIPEADRLDDGCASVISEEANIMGLPGNVEGPREQTQRCFTLEEATDTILFCSSIAHDIAYRAATIGLEHEQHSELASARRPAVPMAGQSIPRGDGSRKPPHRLVPRHRKRSEGETVTEPDKMEVVAEDPIPVRPVPEFSRTSGSFKSPKVDSKCNCAIM

SEQ ID NO: 68933 - protein, 282 aa, Zea Mays
MLNLLEIVKVFNRTSTDLNTKDLETNVIVLVHGGGFGAWCWYKTISLLEDSGFKVNAIDLTGSGIHHYDTNKISSLSEYAEPLTSYLKGLGDAEKVILVAHDLGGACVSYAMEMFPSRVAKAVFLCAAMLANGNSALDMFQKQMDTNGTLQKAQEFVYSNGKDRPPTAINIDRASLRDLLFNQSPSKDVSLASVSMRPIPFAPVLEKLVLTAENYGSVRRFYVETTEDNTIPLPLQQSMCGANPPEKVLRLKGADHAPFFSKPQALHKTLVEIATMPHVRAS

SEQ ID NO: 68934 - protein, 60 aa, Zea Mays
MFYIAAELSSPSDPFESLADPEAKKEDEITKMAEAIMDEAVTRLLNEAAEAVLKEEWLLL

SEQ ID NO: 68935 - protein, 334 aa, Zea Mays
MRHPLIRRVQTSGGFVLQHLVPVSLSTQHDQQQLNQAPVYYVQSQDHAKSTESKALEPLVQGVQPLVHNPEVMAQVELPQKPNQATELYPQPQNHRLQMPTQQVDSHTWHPQQPMVQQHQYIIQQVSRHMAQQQSSSPHSQSAQATPLFPPFSSPKPASSNTDPITRSMAGQPPYSSSQQQHEVAHSFYGQGNTILVPVADHNAQHQQSQSVQLHSQGTCLPQPSKPSHCSVASYAVQGNGQTYSSTYKNPSNCPATVVALLPQPPATASMAYHPLGPQVVHNHPFGNMVETASVVGYSRDQGEILPVVTAVQPVMVDKLNAGSNVTSPREWSA

SEQ ID NO: 68936 - protein, 163 aa, Zea Mays
MYQDPRDACSAIAAESYKLWLEHENRTDDITIIIVHIRDMENAGPAGSDKADYGSIGASIAGQTIQSEIPVFVQPEASNMNRSAATGMRSPSFGSPTERSLSCVAPSPTDPLLIHGRVSDASKPGQSEQRAASQPPVQTWHQIDGVTTELERSMQQSILPTSC

SEQ ID NO: 68937 - protein, 1134 aa, Zea Mays
MALFRKFFYRKPPDGLLEITERVYVFDSCFTTDVFDDDKYRDYIGDIVAQLQSHFADASFMVFNFRDGDSQSLLANILSSYDMVVMDYPRQYEGCPLLTIEMIHHYLRSGESWLSLGQQNVLIMHCERGGWAVLAFMLAGLLLYRKQFIGEQRTLEMIYRQAPHELVQLWSPLNPMPSQIRYLHYISRRNVSSEWPPQDRALTLDCVILRNIPGFNEEGGCRPIFRIYGQDPLPATNNTPKVLFATPKRSKYVRLYKKADCELIKIDIHCHIQGDVVLECISIDVDQEREEMMFRVMFNTAFIRSNILMLNRDEIDILWDAKDRFPKEFRAEVLLSEMDTANQLGPMEVAGIGEKGGLPVEAFAKVQEMFSNVDWLDPTGDAAVQLFQRLTSSENIQLRQGFLSPSKKEAESLELGSISPIDKHFDNVQQEPSKVEHPTVYVNKLENVGQERLVLLEQTTNSEVKTGISVVQENPGSLVHKVDSNAKQSISLEKAVPSTMKSIDPVLKDQNAKLDEQHGSGQHSFPTIIMSQRFPISSSCPALSGYSSPRLLSACPRFNSAPSALGITALLEDHAGSAENRCGSTTLTFDTTGTPVVTKGMPLLRPPPSPLDLLVSDSTMMSEAKGSSQPTLNNSERQLTFQSLGTTTPATNHQKSSTTVTIELLPTSAPPPPPLPPPSSVFSSRIYHLPPSPTSFRSPAPAAPQPPPVPPPPPPMPRPFPVRSHAPQPLTPQPPALSSSLILSGTPQSPPSPPPSRCSLSKPPAPPPPPPPPPLLASTSSTIRPAASHLPLFASTSSPVRPAAPPPPPAPTSSPIRASALPPPPPPGTSSSPRPPPPPCYSSKQSSSPMGKSMPSPPVPPPPSHGGRNGASGNIVPPPAPPGSNAKLFGPQGRGPAPPSGPMSKSFQSGQAVLRRSNLKPLHWVKVTRAMHGSLWAESQKPDETLKAPVFDMSELENLFSAALPSSDSRRSDKSGSRASGSKPEKIHLIDLRRANNCGIMLTKVKMPLPDLMSAILALDDTVLDADQVENLIKFTPTKDEIELLKGYKGDKQVLGECEQFFMELMKLPRVESKLRVFSFKIQFRSQVSDLKRNLNIVNSSAEEIRGSVKLKRIMQTILSLGNALNQGTARGVP

SEQ ID NO: 68938 - protein, 380 aa, Zea Mays
MVALASLSSLCPCGIARRRAASATSSTAFSISCCAVATPSFSGKGPQESRTPRRRLRKTEGATKSLEDSVKRKMEQFYEGADGPPLRVLPIGGLGEIGMNCMLVGNYDRYILIDAGVMFPDYDEFGVQKIIPDTTFIKKWSHKIEAVIITHGHEDHIGALPWVIPALDSTTPIFASSFTMELIKKRLKEFGIFLSSRLKVLRIKKRFQAGPFEVEPIRVTHSIPDCCGLVLRCGDGIIFHTGDWKIDESPVDGKKFDRQALEELSKEGVTLMMSDSTNVLSPGRSISESVVAGSLLRHISEAKGRVITTQFASNIHRIGSIKAAADLTGRKMVFVGMSLRTYLEAAFKDGKAPLDPSTLVTKMTKVLKPFLRSLSRDAAA

SEQ ID NO: 68939 - protein, 122 aa, Zea Mays
MDNLKERGHDAAGANSGVWMTVPAFGDWDTKNGALPDYSMDFSKIRETRKQNKKELSRASLGGDDDLFAHAHAHAQKPQANSAQPKLGRPCPAADRRPLHARDHSPTVNLRVPARFVPESLK

SEQ ID NO: 68940 - protein, 88 aa, Zea Mays
MLLHLLLGTGYRDYLPLGNQPLGPSQLNVGCRVLHLDFYLLKSSLQMHSLLLLQLSALCACMALGRSVLAVYWRNKWLPANDKNDFKE

SEQ ID NO: 68941 - protein, 229 aa, Zea Mays
MLHRHYPRRPRRRSRSEDERCCWCFSCDCDYIEKPEQKCGFWAVCVFVYSLVDYFIPISLVSVLLWLVLRPSNLRPRVDAAVAVSFSLDNATSSLDYDFAVDLRFRNLHRHLDVRYLDLVALASYGGERLGPSADVLPVFVQRPMASNAVRASFQGSAAPLSPAAAELFAMEAANGSFGVLVKVASTFMYKFPFQKTVYYLDHECYIRFPAPNGGVVTPGTLCSATARK

SEQ ID NO: 68942 - protein, 756 aa, Zea Mays
MKPRTATLAAGLLQLVALAAVAEADTDAGDVAALGNLYSSWNSPARLAGWSASGGDPCGAAWTGVSCSGSAVTSIKLSGMELNGTLGYQLSSLQALKTMDLSNNYLHDSIPYQLPSNLTYLNLAKNNFSGNLPYSISNLVSLEYLNLSHNSLFQEIGELFGSLSSLSELDISFNNLTGNLPFSMGSLSKLSSLYMQNNQLSGTVDVISNISLATLDIASNNFSGMIPQEFSSIPNLIVAGNSFVNMPASPPQALTPPPNPRGRPDDRRGPTSAPTVPETPIDPDDKKMQTGPLVGIAVGSIAAASCVLFALVLCLHNARKKPDDGSSEAKASSREVMDSSHDNAAVATSDLQLIQPAGKMTPDDRAHGPNGCTAKRPKQQVTVTTVSSYTVAALQVATNSFCQDSLLGEGSLGRVYKAVFPNGKVLAVKKIDSASLSLYEEDNFLAVVSNVSRLRHPNIVPLAGYCVEHGQRLLAYEYVGNGTLHDMLHFSDDDGMTMPGKTTRLAWNTRARIALGTARALEYLHEVCLPPVVHRAFKSSNILLDDEYSPRLSDCGLAALSPNPETEREAFAGVVGSFGYSAPEFAMSGTYTAKSDVYSFGVVMLELLTGRKPLDSSRERSEQSLVRWATPQLHDIDLLAKMVDPALDGLYPAKSLSRFADIIAICVQSEPEFRPPMSEVVQQLVRLMQRASIVRRQSDDQLGYSYRVPERDGGDQSWRTLLLLHKALHSLYIFINKRASKRKEKQLDMDGSFTFC

SEQ ID NO: 68943 - protein, 344 aa, Zea Mays
MMEADMKSVSVGTKSKSEVLESCLQQMKACFLDARVKKAKLLDAMGTFFARSNRPINETQNPVEVVRPCGACNGSEMLLKRRASGEFMVGCRSYPQCRNVVWLPGSLSEAAVTNQVCPICAPGPVYKIQFKFRRRDIPPNFDVDHLGCVGGCDDILKDLMEISRFGSRSQAATPARGPTPNGVGQGTPRQDLHTIFRPASQLNNDNPSVMHSQGFRSTHTQNPSNASDAGQVLCTSCGALCISRIANTEANRGRRFYKCQDPGCGFFKWEDEVDNGTGRGRRGRGSSRQASASASAGRRGGGRRGRGRNADGGMFVSATGDTVLGCCFNCGDPSHFANACPNRR

SEQ ID NO: 68944 - protein, 100 aa, Zea Mays
MIWALIADFELSEGIYSCAKIEDTDSVCLWLGANVMLEYSCDEANALLKKNLENAKASLEVLVADLQFLRDQQTITQVTIARVFNWDVHHRRSKQAVKEP

SEQ ID NO: 68945 - protein, 222 aa, Zea Mays
MSRDHEWERERQFPSPGNTHTRDGSHGRFLLFLISRMCCNRTTHAANEMWTHGQDGRDTNADFFLSIACRQKRIVQHHIWRGGASPTGEVGRWCRNSPERHGRTARAACWGWQRSLTENGAARRRAGESRAQPMPSHDMLRTTKMKRGGGGRHRPWGELERRWLGGALGARVRQHATNDGVRGGDSSARRSSVLSACRTGWLRALAARASRAGGASAVVVLE

SEQ ID NO: 68946 - protein, 129 aa, Zea Mays
MQRPQNERVEPEPPIIEDVEDNDDFESVHLNGTTSSEDNDSDDNDIYGIEHDPGFRTPFSSYFINNQDAVRRAYIALGPCQPNIKKDDFPQHECGGISRFLPKWFSEFNWLEYSMDKDVVLFCLLSVQR

SEQ ID NO: 68947 - protein, 430 aa, Zea Mays
MTHRKHREHKLDWCYLNDDSYTDIFHNEVKQLVDKIFSSDGHNHACVVTCGSTSKTHLVIGSDHQPGLLTMAMERIFDYAKPIRATVSVSSYHVLQDSHVFDLLDPKNNEVLVREDADGRTHLKGLSMVEINSIQEFQNLCYDSDKHQNRTKVSKAKGHNGFIIFISKSDQNGKESSVSKMHFLELADHINDKQKSHGERFVQQNSKKSLYAVMDVVQALNSHQSFIPYRKSKITHILQDSLSKTGGALLIACLDEVSCQDAISTLSLASRSSQVVNEQRYNLSLITKGCSKSNVKLSVNNKNLSRSLLSSIQQQSPVLEKPYKTQVNNIAVKATRSLNANKRSETSTHSAKKTVNLVSASINLKHSGAKSILRERNFFIPTTNSSKEDKKTFVTTAVRKHEVCILSILYLHLPLTISEHIYIRVFYIIS

SEQ ID NO: 68948 - protein, 622 aa, Zea Mays
MSSRLCVKNLPKGADERRLRDVFSRKGEVTDAKVIRTKDGKSRQFAFIGYRTNEEADEALKYFNNTYIDTCKITCEVARKIGDPDAPRPWSRHSLKKSEYGSKDKNNAGAVDAPPKGSNAQGTSAHASGSKGSVANDPKFLEFLEAMQPRSKAKMWANDTAATLDTAAKDSVVAAKESKGPLKNVLTSENDSSSEDTSDEKVANDLSSENASEQLKTENKQDKNMTDADFFKSKVKKNWSDSESDDEGSAHQSNTTTDDEDSSDESQDSDNQLADTKGDPDKRNIVDKDTLVENTDLQEPEDLDNKESEDLDGRPRGTEIHEDQERADENGAPITDEKKLALETGRLYICNLPYATSEDDLVELCRQYGDVEQAHIVVNKATKISTGRGYVLFSLPDSAVRALDELDNSSFQGRVLRVKAAKPLNKLESFHETAVEKVSLKQKRLEQKKASEISGDTRAWNSFYMRQDTVVENIARKNGISKSELLDREADDLAVRIALGETHVIAETKKFLSRSGVNVAALEEHASKRNEKFKRSNYVILVKNLPFNSTEEELATLFQKHGSLDKIILPPTRVFALSLLKQLKPNTHSKNYYIHDIRILLCIWSGHLKTYCLLPQHRWMRK

SEQ ID NO: 68949 - protein, 262 aa, Zea Mays
MRFLYSLTAINSSVCPCSLFQDAEWALSIPIEDFIYIMHDVHAVIGELSESGSFIGHVNQSLGSCPIEVFNLVKGSILQAAEPLKELLPAIMDVMIGIIVKKSNEDLKHLKGITATYRMTSKLPVRHSPYVSGILHPLKVFLEGDRMHYLSEDDKTKLCRGSANKITATYYDLVSEVVTVARKTESSLQRLRQGAQRRVGASTDASDSIISDTDKICMQLFLDIQEYARNLRAIGIDAREIDSYRALWQCVAPKDRHENIQF

SEQ ID NO: 68950 - protein, 241 aa, Zea Mays
MDVVSNDKGQMSGVHLKRRDTGEESVLTVKGLFYGIGHTPNSQLLQGQIELDSAGYILVKEGSAKTSVDGVFAAGDVQDHEWRQAITAAGSGCIAALSVERYLVANDLLVEFHQPVQEETKKDITDKDVQMGFDISHRKHKGQYALRKLYHESPRLICVLYTSPTCGPCRTLKPILSKVIDEYGEFVHLVEIDIEEDPEIAEAAGIMGTPCVQFFKNKEMLRTVSGVKRKKEYREFIEANK

SEQ ID NO: 68951 - protein, 424 aa, Zea Mays
MSVTHFKKKYEEYDLKGDEQEQIDRLAEDGDIYSKLARSLAPEIFGHEDVKKALLLLLVGAPHRKLADGMKIRGDLHICMMGDPGVAKSQLLKHIINVAPRGVYTTGRGSSGVGLTAAVQKDPVTNEFVLEGGALVLADMGICAIDEFDKMEESDRTAIHEVMEQQTVSIAKAGITTSLNARTAILAAANPAWGRYDMRRTPAENINLPPALLSRFDLLWLILDRADMETDLEMARHIVHVHQNLESPALGFTPLEPSVLRAYISAARRVIPSVPRELEEYIATAYSSIRQEEAKSNAPTSYTTIRTLLSILRISIALARLRFSETVAQSDVDEALRLMQMSKYSLYSDDRQRSGLDAISDIYSILRDEAARTSSMDVRYAHALNLISRKGYSEAQLKECLEEYASLNVWQIHPSTFDIHFIDA

SEQ ID NO: 68952 - protein, 215 aa, Zea Mays
MSDSKGGAGGMGMNMVTTVMAFSVSAFFVLFVFTRLLCARLHLSRAAAAAQGYNVERGTHGLEPSVVTTFPTVKLGDGGQQPPPVQEESQCTVCLEEYEAKDVVRVLPACGHAFHATCIDAWLRQHPTCPVCRASLRARNGCRATPVDYSLLVAGADAAATVQHVPASSSGASPQAVGRQRQTDDTGRADGLLEIVSEEPASSRDPSPAVAAAGW

SEQ ID NO: 68953 - protein, 146 aa, Zea Mays
MEQNDGSFLAVRRLSGGAIHHHRHHSSPAEVVGVSTAWIGKGLTSCVCAQGTESDGRLSFDLSPIQEECLHRLQNRIEVQYDGSNLEHQKALVALWHASFPGTELLGLVSDQWKEMGWQGKDPSTDFRGGGFISLENLLYFSKKYP

SEQ ID NO: 68954 - protein, 451 aa, Zea Mays
MEDPVAVPSSSLTDPAAAAAARVPGAVAAAPGVTSAPSALAPTQPPATAAAVSEAATPCQRQLFTVELRPGETTIVSWKKLLKEAGHTAAAPPVAVEPAFAAHAGPSGPANNGKIQEHELMNRLMGIVGHLVQRRTLKGWQRVRYYPHMSIPVILIFTRAREHTCGLRRNMKEMVESGISAKLEKADRFQRVKLEINEMIKERMATKSKVNEQDGSADDFQVANDERRALKTKYTMDTALEDKMCDLYDMYVEGMDEDKGPQSRKLYVELAELWPHGCMDNVGIKDAIYRSKERRRLLYSQQKVRSEERMKRKRLAATAKLPDGLAVAMQSGVAPQVAQPPITNPITYHTADYGQNPGLKYFDRARETSSSAIPDDGNRIAGEVKKKKRKPEYDPVDTQANLPRAPMPHGSEKQKPSKPADEASAGSLPSMATTQTVLGLPSVLGHNQQPS

SEQ ID NO: 68955 - protein, 392 aa, Zea Mays
MASSSSLASAKALARSHASLLAPQTQRTVVAPAPSRSRRASVRMRASAAAPAEPKKTVWVWTESRQVMTAAVERGWSTFLFGSKDLGKDWSWIFDEENQKVAVISQVSSPGELDLVQPDNAEAENIVIDFRGGWQVIRAENIVAAFQGCKGNVLAVSTNTTEAQVFLEALEQGLDGVVLKVDDMDDIIKLKDYFDRRNEAKSQLPLTKATVTKVEVVGMGDRVCVDLCSIMRPGEGLLVCVGSYARGMFLVHSECLETNYIASRPFRVNAGPVHAYVTVPGGKTSYLSELGSGKEVIVINQSGLWRTAIVGRVKIESRPLILVEAKDNSGDETYSIFLQNAETVALITPNTGSSGRTAIPVTSLKVGDEVLVRKQGAARHTGIEIQEFIVER

SEQ ID NO: 68956 - protein, 140 aa, Zea Mays
MVEVCCIFMISLLANNLFDYLLGNIYLDYLLLVIIYIRNLTWNMSNYSTIQKSNCRKFPDLTMAGFADALKPEKLSDMHFKRWQSKVTLCLAAMNVFHISKCKPEDVLTHEEEKKYDDTNTIYMGAVLRVLVNCLLDSKL

SEQ ID NO: 68957 - protein, 91 aa, Zea Mays
MAGANGWFQRRKRGNGAPPRAIFHTSRPLRRRTTTSTLLSYASLGSLWSMSMTKTFTSRQLWNKSRTLNRQADVLARSQPFPGRLELRGCY

SEQ ID NO: 68958 - protein, 278 aa, Zea Mays
MPLATTAPTPAPPCPPPSPAAAPVRTQLLSSVAKLALTAALVCGSGGPAAVVVVPAAAQAVPFVRPPPPPLQGRPFASSTPYAQSQKLQLGLDKLGKIRPCPSTNPGCVSTNPLGSSGSFASPLLIPESSAGEKTVAKRNSSSSPFQIKHSVNRVMLCFCVSQLISCYFVVAGGVRTCCKSLRQAIEKTQRNVEFKVDEDTPYGHYIEAEMDGGVGRDVMEFLVKKDAGVVAYRCMATKVTFVYPFTTAVGDSKGQKQRIAAISQELGCLKRGASFLP

SEQ ID NO: 68959 - protein, 184 aa, Zea Mays
MGEEASCNAASAMEAATNARPAKENGRAPAVAEVVAQEAAADPRLQGISDAIRVVPHFPKHGIEARGFIFGPAVALAIGAKFIPLRKPRKLPGEVISEKYVLEYGTDCLEMHVGAIERPGERVLITDDLVATGGTLCAAIRLLERAEADVVECACLIGLPKFKDFYKLNGKPVYVLVESRESDK

SEQ ID NO: 68960 - protein, 443 aa, Zea Mays
MLPLSRLPRPIARLGRRRLGRRPPSGNSPRPRRFPSRRWLKTPSWTHTPGRRCPGCRLRRRRRRRMRGQQPKRHRRPLLQLPLHGNDARVRNPVARRALVMPAADGLEKSAPAPEPSPVYVPNARSNGADPHQNGRPGSHHHGRGGGYGGGNRRGNGGGGGRRGSEHHGGFDGQRRGGGRRDGHGPVHQLRGHQPTYIKAPVVAGAPPPPPPFVSPATPQTPPYGPPMGFHDMSAHVYYFPAPTSEGIQGLPFVPLPASPQAVLIDPSRKNLLEQIEYYFSDDNLCKDLYLRQHMDGQGWVPLSLIAGFRQVQKITNNIQFILETVMLSNIVEVQGDKLRRRGAWENWLLPKLNYSAGSSSGSMTPVTSNIDALASQFRSVGLEGATYHPSMPGMSGEALLTRSATSVSLGYHASTFGGLQSNGSEPLFGPKSARNLLRSDTF

SEQ ID NO: 68961 - protein, 852 aa, Zea Mays
MFKFLKEVVAGSGSGLKDFPYTIGEPYASAWGSWKHHRGTSKDDGSPVSIFSLSGSNPQDRHMVAGRNGVKRLRTVRHPNILSFLHSTEAEAADGPAMKYTIYIVTEPVMPLSEKLKELNLGGTQRDEYFAWGLHQISKAVSFLNNDCKLVHGNVCLASVVVTQTLDWKLHAFDVLSEFDANNEASGSPMLQFEWLVGTQYKPMELSKSDWASIRKSPPWAIDSWGLGCLIYELFSGAKLARTEDLRNTASIPKSLLPDYQRLLNSTPSRRLNPSKLIDNSEFFQNKLVETIQFMEILNLKDTFEKDSFFRKLPNIAEQLPREIVLKKLLPVLASSLEFGSAAAPALTVLLKMGSWLPADQFNIKVLPTIVKLFASNDRAIRACLLHHINQFGESMSAQIVDEQVFPHVATGFSDTDGTIRELTLKSMLVLAPKMQERAHTHNNLPWHALMEYFWDFRSSIPHALISISCQKLYLQMTDCLVDEEPGIRTNTTILLGNIAGYMNDGTRKRVLINAFTVRALRDTFPPARAAGIMALSVTSSYYEMTEIATRILPNIVVLTFDPNSDVRTKAFQATDQFLQIAKQHHEKLNTGDNSVAESTGVKLKPGNAGLLGWAMSSVTQKGKPFDHAPISTANANNSQASTTSTATPDTQASTLAYAPSTSTSLDQAASASARSSVDGWGELEDGNIHEENSSDKDGWDDVDPFEDKPSPSLLSNIQAAQKRPVVQPKQPVANSSKPNPLKAPKSEDDPLWGPIAAAPPKSAVKSADIKPSTSHNDEDDLWGSIAAPPKSSGKPLKPAVANSDDLWGAIAAPPPATKARPLASSGRGRGTKPAQPKLGAQRIGRTSSTGM

SEQ ID NO: 68962 - protein, 420 aa, Zea Mays
MPAPRPRSGHRGRLGDAAVGAGHRHRRRGRRGAGHGGGAAAARRGRRRAGAGRRPARGRHVPDAVQERVARAGRHRRRRRAPPQVPPHPGDEDEVAGAGSARVLLRRGSSREVRAVERRALLETLASKLPPGAISFSSKLKSISEQGRAGTLLELEDGRQILAKIVVGCDGVNSPIARWMGFSEPRYVGHMAFRGLAEYADGQPFEPKVNYIYGRGVRAGFVPVSATKVYWFICFNRQDPGPKITDPTALKTEALELVRGWPSDLLAVMRSTPEGAVVRTPLVDRWLWPGLAPAASRGGRVVLAGDAWHPMTPNLGQGACCALEDAIVLARRLADAGADGAQAAAAMRAYEAERWARVFPLTARAGLVGALVQWENAAVCAARDGVVIPRLVRLGPFLEHTNFECDLLEPAPGVAMTPAH

SEQ ID NO: 68963 - protein, 150 aa, Zea Mays
MAPNTLSAPAAAPPPGSPPPLGVQACPTMAAPPPSPPSPPGYPDSMAAAAPAISLVADLAPAPATAPPSALLLQALSPSHGTRRNPMIWGKTKSKHNPRQSLDEKSKPKPSAFSWVPEGFYVGKVLCGVISNSLLLMSYSIMTLGKDVFL

SEQ ID NO: 68964 - protein, 2182 aa, Zea Mays
MKWSTLLSKVVFAGGQQQQPPPPPSPPPESPFHGQQAVQDLATPRLSSASTGGDEGGFDAAAGSSPSAAASSARGRNELESDFRRLWEEFRSSSSEKEKERALNLAVDVFCRLVKQYSSVAQLVTKLVEGHIFSFVIGRAFVTDVEKLRIHSKGRPLRVADVIGFFSDTTELGICPGSNLLYAVEVLVTETNDRQPLLDSGILCCLIYILNSLLSPNENSTDTLPVHQEGSRNEKNKNLDPMQSRRLEFRDGIVPLHTIQLHRHAMQVLGLLLANDNGTSAKYIRKHQLIKVLLMAVKDFNPQSGDAAYTMGIVDLLLECVELSYRPESGAIRLREDIHNAHGYQFLVQFALTLCSLHKNQTLQSSSKLASEADASVPSHRLEQDIFSCDLSPQLSRLLDVLVNLSQIGPSENGGVSSPKALRGYHLLALFLHRRMSLFDMQSLDIFFRIAACEASFPEPQKSKINRTAGYASGMSPEASLDDLTLPRFADDMSSGGSHGDLDDFSAQKDSFSHLSELENADLAGETSEFIVLSNADMVEHILLDWTIWVAAPISVQITLLGFLERMVSMHWFRNHNLTMLRRINLVQHLLVTLQRGDVEIPVLEKLVVLLGVILEDGFLASELELVVRFIIMTFDPPELTPNRQIVREAMGKHVIVRNMLLEMLIDLQVTINAEELLEQWHKVVSSRLVTYFLDEAVHPTSMRWITTLLGVCLTSSTTFALKFRTSGGFQGLNHVLPSFHDSPEIYYILFCLVFGKPVYPRVPEVRMLDFHALMPSDGNYGELKFVDLLDTIIAMAKATFDSLIMKSMLAHENNNLSHLNGTLVADLVEATSDMGGDLQGEALMHKTYAARLMGGEAAAPAVATSILRFMVDLAKMCPPFSAVCRRHDFLESCIDLYFSCVRSDFALRMAKDLTTVATGEMNEHDDDNGSLKDALSSLPHDQDQSTKTLSATSFPQEQKSSSSESTGMPNPFETAEAKADDSSNQEFSNKILNGEANQIFNNARDQGRITASGANGISEFHHVTDSPNSVAMNNVGSPVLSERSTHRAASTPTASPMAPFTSWPGSAGSYTDGRHLTASPSMASSISGIDLDSSPDLRTNIQGPSAANTLFPINSKLLLDIDDLGYGGGPCSAGATAVLDFVAQILADTISDQLKAALFIENILESVPLFVDIDSALVFQGLCLSRLMNFLERKLLLDDEEDGKKLDKSRWSVNLDPLCWMIVDRVYMGCFPTPLRVLQTLEFLMSMLQLASKDGRVEDAVPPGKGILSIARGSRQLDPYIHAILKNTNRMIMYCFLPIFLKSMGEDDLLANLAFLTETGRSLASKRYQEDFSIDICTVLQLLVANKRLVLCPSNVDTDLMCCFCINLMSLLHDKRVTAQNLAVDLLKYLVVHRRQSLEDLLVCKPNQGQQLDILHGGLDKLVTGSTSTFFEWLQSSQQTISKVLDQCALIMWVQYITGSAKFPGVRIKGMEVRRKKEMGRKFRESAKVDARHWEQINERRYNLDLVRDVMSTELRAIRQDKYGWILHGESEWQSQLQELVHERGIFPMRQPSTEPEWQLCGVEGPYRMRKKLEHSKFKIDTIQNVLTSNLGSNGGKIINKEDGELLLTSGSDTMSGLNLLTYDTEQRDLDAVEFSSFKDDDDIFKGGSTISGPIGWTDDKSSVNEQSLHSATEFGAKSSSLSFHMTESHQGKSELSSPRRAPSVKGTDARTSEDKSEKELLDNGEYLIRPYLEPYEKIRHKYNCERVAGLDKHDGIFLIGELCLYIIENFYIDDSNCICEKGSEDELSVIDQALGVNKDIMGGSESQLKSPTTWGGTAKVLLGGRSWAYNGGAWGKEKLCNSSNLPHPWHMWKLDSVHELLKRDYQLRPVAIEIFSMDGCNELLVFHKKEREEVFKNLIAMNLPRNSMLDTTISASSKQESGEGSRLFKVMAKSFSKRWQSGEITNFQYLMHLNTLAGRGYSDLTQYPVFPWVLADYESDVLDLRNPQTFRRLDKPMGCQTEEGEEEFCKRYDSWDDPDVPKFHYGSHYSSAGIVLFYLLRLPPFSTENQKLQGGQFDHADRLFNSVKDTWVSAAGKSNTSDVKELIPEFYYLPEFLENRFNLDLGEKQSGEKVGDVVLPPWAKGSAREFIRKHREALESDYVSENLHHWIDLIFGYKQRGKLKMPSMSSITTHMKAMLT

SEQ ID NO: 68965 - protein, 717 aa, Zea Mays
MESTDKNDKRNAVTEESSNPGQNCEDDGDFSMKTEMLNVEEAPSFSNDKLNNESEVQIQEGGNDSEEGLNGQMNERTSSDVMECASSNEITKENLSEDKTEEPVFDGTEVLEIEEMRRSSNQSGELDSEAQGSVLNDRAVAIKNFVKERSAIAVSTFMRRLSGKKDENEFKAEADKTIGSEYMDCEKTRTDAESNPKEVQQKSVERTVWNPLNFIKIGRDSDTFVTGEALNENVPGLLEIPPLKGRIIIYTKLGCEDCKKVRLFLLRKRLKYVEINIDIFPGRKLELEKNTGSSTVPKVYFNDLLIGGLIELRKMEDSGILDENIDVLFNEESPYSAPLPPLLGEDDESGSGKIDELATIVKKMRESITPKDRFYKMRRFSNCFLGSEAVDFISEDQYLERDEAVEFARKLARKYFFRHVLDENVFEDGNHIYRFLDHDPIVMTQCYNIPRGIIDVAPKPIAEVASRLRLLSCAIFEAYVSADGRHVDYQSIQGSEEFKRYIRTVEELQRVEIDYLSREEKLAFFINLYNMMAIHALVTCGHPAGPLDRKKFFGDFKYIIGGCAYSLSAIQNGILRGNQRPPYNIAKPFGQKDRRSKVALPYHEPLVHFALICGTKSGPALRCYSPGDIDKELMEAARDFVRNGGLIVDPEAKIASASKILKWYSTDFGKNEMEVLKHAANYLEPAESEQLLELLASTQLKVMVVLIIFLNSVQLTK

SEQ ID NO: 68966 - protein, 747 aa, Zea Mays
MEEGTTEPGSFSRSSSFVGFEEWVALVRKRNGKASSCGRLGLRSTASSEVLELADPDSNVINPDPCDQVPEGILWERLGRVSMMDIESSDFSWTSLTSLHHTKHTATSTDPSEDDISRSFEVTVNSGGIVFIALFKAIENVDLPSKETAAVIKIAPSRMATQSERFGYELAKWLGVRTPQGRVIHSSSDEWQQVKDAVENARNASIASGDELEEMICAEVLEALELSRCLFLMNYVHGSALLENVMPFESRQAAEKTAEALGRVLILDLVLRNEDRLRCRPLGWRGNYANLLVANREAYANLDSLDDVYDSAIIRYKPEIIRSPQKQKQRRAVSISGSIGSDVSDLTLEDSYASSGHVFSSFNIVAIDSGVPRRPPASKRAKDQESYPKLVELTLNNFDYSSKLLFEVSFGKLGTPGHEEFDVPSDYSYNSPLSESDMVATVHSFRGGFRSALRDLQRFHIFLITLYQKLDGLLKIFFNLMYKCSNEYAREDAGTSDSPLCSVEPQGDSNDTDVPRHLRKPSRTLSRESLDQSSPCRDSFITRHFKGNGDSSRGLRLTMKLRDFNKYAKIDSELSKEIEQWNDMLRTEVVKLCQDNNFQTGFFEGTDNSTVVDAYELKVRLEHILERISLISDAASTERPSQITDYLYIGGALAARSTHTLKHLGITHILCLCANEIGQSESQKPDLFEYRNFSINDDDNADIGDLFQDGSDFISYVDHLRGKVLVHCFEGKSRSATVVLAYLMLRK

SEQ ID NO: 68967 - protein, 510 aa, Zea Mays
MAISTWSARLLLTPASSRATLSPPRPPTTNPLSSFFPRNRLHFVRPRPRPPCAYISAPAPGPEAAYAPPSLDATAAAADVAAAISSSDAVTWAGVWALLSRHRARIAVCIAALVACTTCTLSMPLFSGRFFETLIGRGNEPLWRLLSKIAILYTLEPIFTIIFVINITIIWEQVMARLRSQIFRRILIQKMLFFDRHKVGELTGLLTSDLGSLKSVVSDNISRDRGLRALSEIIGTLCILFTLSTELAPVLGLLMVSVSVLVAIFKRSTVPTFKSYGIVQARISDCASETFSAIRTVRSFGGEKRQISLFDNLAHAYQNNGTKLGVLKSANESLTRVVVYVSLMALYILGGRKVNAGKLSVGTMVSFIGYTFTLTFAVQGAVNTLGDLRGTLASVERINSILSAKDIDDSLAYGLAKELDGKEFDDSNGVYENGSVNKHFMSELKSSSSCSNLAWSGDIRLKGHIIITSGLVTFVFTSRVPLYLSLYYISPFVCFIYYYYIAYCSLAYGS

SEQ ID NO: 68968 - protein, 177 aa, Zea Mays
MKSWNWQHDRIFQGKKGKRSAAKLKQSLRYTRCEQFLSKGQGLISYLSSPWHCSPGQPPSRSCARRRAWEETTITWTLFSKWISIFVAALDKLEADLSKFDDGPFFLGQFSLADVAYITILERVQIYYSHLRNYDIAEGRPNLQEFIEEMNKIEAYAQTKNDPLFLLDLAKNHLKIA

SEQ ID NO: 68969 - protein, 96 aa, Zea Mays
MNRPIKHRLDGLLNHTAILSSLLNKLAAITNPQASKDGLCGGDQSGRTVAGSFGVRDQKNWRATETSRLVGIASTVGVGHRREAPDCCSLFCLIVH

SEQ ID NO: 68970 - protein, 288 aa, Zea Mays
MCVHNIIYLQLVFILLLDFIVCIVFSFLILLTAPFQIITTMRTLYQTCKLVHGDLSEYNILYFEGHLYIIDVSQSVDLDHPSALDFLKEDCLHVSDFFKKRGVPVMTVTDLFNFVIDQSISDEGVDDYLEKAQQKILENGGAVPNDDEITPTVMVQTLDYVKQCEADIVNMSIMQRSSSGYEPTADKLYDQPLLGFVRTKNTHTEKEQGQPARNLVEVEEDESESCSSSDEDDSWHEDDPKVGPEERKAARKENKKKVKEEKREARKTKIPKAEKKKRKKMAKAKCKR

SEQ ID NO: 68971 - protein, 624 aa, Zea Mays
MASGGGGIRATTSGRMKSRGWGDSSDDFGTPAIALRRGGDCSGTASSDSSAVFFAVAFCAPSPGLSVTAAAAMVEMRQRRKPLVLASTQALLDSLPGDRPPPPPQKPVRLKAGVLRFPSGGGGAEFGELASFVGIPAPALRRLAVVTGTPVLVKNTDNNVGRIVKAVLFGNPSLDKSCSEHTDQVIYSSFGGSEYQDMVDQALNEYFKFDRFLARGDVFGIQNSWKCGSSCCLACNKQDNKLNPRNMIYFKVTGMEPSDEPILRVNCNETALVLGGAASAAIPPYSFFASSGNSVPLHSEVVEHLASVIAPALCPSDILPKIKFSTFLYGPPGCGKRTVVRHVANHLGLHVVECSCHDLMTSSESGAPAALATAFKEAQKYSPCIILLRHFDAIGNASSNEGPQSEQSGIASNIESVIKQYIGQRWVAKDSLPGKDVNGSSYLVEPECVSSLQIILVATADSSEGMQQSIRRCFRYEIDMKTMNEEQRNELISETLQGIPKVADESICDKFIKDLAAQTSGFMPRDILALVADAGVSFAHKIAAGKDSKAISKHTEVLPESSSATQNEEHHFSKEDIMSSLERAKKRNRAALGTPKVPNVKWEDVGGLEDVKKVILDTIQVNWT

SEQ ID NO: 68972 - protein, 114 aa, Zea Mays
MVAELAQPPLYWWLAPISLRRASSPCSSSPSAPSCPCARSSSKSRLGAIPIDHACSCTFNSSSCMVEPSSPRPTSDSRHRSACRRPLVNARTSNLVVDAVLRAPTIVGTCSQML

SEQ ID NO: 68973 - protein, 992 aa, Zea Mays
MWATLHKPVAHANLRLLLTVSAFSGPLHLGTASAVAAAVTTRRSSSSRGVAATAMPSSSPPPLPPAEETTASAAALAPEGGFSLTEPSFLESLMPKKEIGVDRFLAAHPEYDGRSALIAIFDSGVDPAAAGLQTTSDGKPKILDVLDCTGSGDVDTSKVVKADADGAIVGASGARLVINPSWKNPSQEWHVGCKLIYELFTDTLTSRLKKERKKKWDEENQESISDALKQLNEFEKKHPKPDDTMLKKAHEDMQSRLDYLRKQAEGYDDKGPVIDIVTWNDGDVWRVAVDTQTLEGNNDGGKLADFVPLTNYRLERKYAIFSKLDACSFVANVYNDGNLVSIVTDCSPHATHVAGIAAAFHPDEPLLNGVAPGAQLISCKIGDTRLGSMETGTGLVRALIAAVEHKCDLINMSYGEPTLLPDYGRFIDLSNEVVDKHRIIFISSAGNNGPALNTVGAPGGTSTSIIGVGAYVSPAMAAGAHCVVQPPAKGMEYTWSSRGPTADGDLGVSISAPGGAVAPVPTWTLQSRMLMNGTSMSSPSACGGVALLVSGMKAEGIPLSPYSVRKAIENTAASISNAPEEKLTTGNGLLQVDRAFEYAQQAKKLPLVSYRISINQVGKSVPKLRGIYLRGGNACCQTSEWTVQLDPKFHEGASNLEQLVPFEECLQLHSTDTSVVQIPEYILVTNNGRSFNIVVNPANISSGLHYFEVYGIDYKAPWRGPIFRVPITVIKPIALLGEPPLLSISNLRFQSGHIERRFINVPFGASWAEVTMRTSAFDTPRRFFLDTVQICPLKRPVKWEAVVTFSSPSSKNFSFPVEGGLTLELSIAQFWSSGIASHEPTCVDFEIVLHGISIDQKVSTLDGESPLLIVARSLLASEKLVPVGTLNKIRIPYRPVECNLSSLPTDRDKLPSGKQIIALTLTYKFKLEDNAEIKPHVPLLNNRIYDNKFESQFYRISDSNKRIYSSGDVYPSYVRLSKGEYTLQLYIRISFH

SEQ ID NO: 68974 - protein, 303 aa, Zea Mays
MPLALAQLQDLRDRISDRLRPWSRSAQFWVRAADIYTSYKVCQLRAGFVKDEDELETMWERQHELGAEKMYSLCSELGGLFLKAAQILGKPDLAPMAWVKRLVTLCDQAPSTPFDVVRDVVEKQLGKNFDDMFEFFDVEPVGSASIAQVHRARLKLSKTDVAVKVQHPGAEQLMMVDIRNMQAMALFLQKHDLNFDLFSATKEMEKQICYEFDFVREARAMERIREFLRVTNKKPPVMVPRVIPGMVSREVLIMEFIKGTPIMNLGNEMAKRGIDPGGKIAAMAKQSTPRKHPYLQGHRGGFT

SEQ ID NO: 68975 - protein, 377 aa, Zea Mays
MAGLILLITCTWLVFKPKDKHKSKKSQYTLQHSDASNRFENENLEFPSIALEDIIVATNDFSDFNMLGKGGFGKVYKAMLEGGKEVAVKRLSKGSTQGVEEFRNEVVLIAKLQHRNLVRLLDCCIHKDEKLLIYEYLPNKSLDAFLFDATRKSLLDWPSRFKIIKGVARGLLYLHQDSRLTIIHRDLKASNILLDTEMSPKISDFGMARIFGGNEQHANTTRVVGTYGYMSPEYAMEGSFSVKSDTYSFGVLLLEIVSGLKIGSPHLIMDYPNLIAYAWSLWEGGNARELVDSSVLVSCPLQEAVRCIHLGLLCVQDSPNARPLMSSIVFMLENETAPVPTPKRPVYFTTRNYETNQSDQYMRRSLNNMSITTLEGR

SEQ ID NO: 68976 - protein, 237 aa, Zea Mays
MCPGHKDAIFILYAHTSPEKKLKGSLIGAASLNLACVGTRRPLVTGLGLCSGASKMQGVLSRVRRPFTPTQWMELEHQALIYKHFAVNAPVPSSLLLPIKRSLNPWSSLGSSSLGWAPFRSGSADAEPGRCRRTDGKKWRCSRDAVGDQKYCERHIKRGCHRSRKHVEGRKATPTTADPTMAVSGGSLLHSHAVAWQQQGKSSAANVTDPFSLGSNRRTVHHILKEVKKSKEDQNLP

SEQ ID NO: 68977 - protein, 616 aa, Zea Mays
MEFKLRIEEGVDQRWSEQFGEERFSGCGVVAARSTYTLILTVSWERDDIPENRFCEMILDSWPKQNWYSEANKNSKEVKLTAYLSTQHRQSTAIPTISWMEKPRTRMYSVDAHPTKPWIITGHEQGRITIRNHDTQMLLCSFKVSRGGVFCVKFIAQKQWFICSSGEGFIHVFSYETQEIQNVNNFRAYDDNSRWLPISLAVHPSRPYVLSWCRYDSEIIMKLWDWDKGWECARTFRSGGINVDHIAFDPKETNRFVATDCLDGKVMIWSLDSPEPEYHLPKTDFKGIMFLEFFTRYGRQCLIIAHEDHKAHVWDFRLRKFVSEKRKLLSREASVFLRPNVSLLLTPSSKGTCRFWDAKKFSFYGVIDNSAGGDVLGIACLMGSKTRFVIGQYYALTILHLDNAIYQKDPRQSIEPQLCAHTRQGDTSSEEKYGEEMVWHHGPNFDWQHEPFDAAIMRASGGENAHEQYTLFDIMIDSTEVRAQRMSSSFCSMSLSSHQPKEQELEVARLRGELRQRDEHHKVQQDYMFSFIQQQHEIIQELSQQHGLDVVLPEFRPPLPPMLPQLSPFLSTISQATTDASGTEPTGMAFVESFAYPPPATDSNHNSNNPCSDFGA

SEQ ID NO: 68978 - protein, 228 aa, Zea Mays
MTEPSSSYSLPSKKRQRSPDDNEHSLDRGRICLSLDDNLTFNDTMIALQLMRTQFPKLDKVLAQPFILQSQLYSSVKDRTQVDRDLESFKKDKVLRIFKLSSGQDDHAIMFMDDYLKQVSFAIKRSGGKDQDGSEVFEWFERYVVPSKLDVSITQLELCSLLSQGGDVTDKHITLLMNAGLLTRQLIDPNIYWFSIPRIGPILKGLSQKVQGDAAFFTGEYKVKIITS

SEQ ID NO: 68979 - protein, 785 aa, Zea Mays
MAVPTNEAPSQGAASSSTTSSTQGFPLADLVGKKEDLDELLDLLVRRPDNELDKVLKVMVISVVGFGGIGETKLCHTVYTDVQESRRFSLHAYVSAAGKDCSIVLEEIIEQFRLQEDPQDSSGGFFHRYFVVVDGVESEELVSGIASAFPDNSMGSRIIMGMRTAVGRDAERCVGHHHKMWPLEDKQSVVCFLNEAERRRRRHEQDDHSSFIRFQEQDHSSSCLHKVCDGVPLALVSVCEVRRGSIITAAVEEQDRWPHRMPKVLDHSYDGLHIRGAGSCPNQYIPYLQACLLYFAMFPRGNHVKRGSLIRRWQAEGLEFGGSNQAAENLKALVDRNFVWPLHASLNEHAKTFQPPGVVLNYISRRSQEEEFILRSCPSGELNPNYSRRLCLHPAEEEEGEPQPVVITNGSVPPRLRTLAVSWGQQQASRIAECEQLRVLDLASYNGLQPDQLEEICKKLKLLKYLSLLPDIITQVPSSMSNLQCLETLEVGEVNGRAAVLVPIQVLELPRIKHLIGKFELIDNFNGLPIRAYPDALVPKAIKESNLETVSGFFTRRGQGFPPLMRHIRQLRKDGPRQTEILQACVAEASGNLYSLKLSSGTNLSRIQLSVIATNKLTGITKLCLSRWKTITLDAEFLNELTKLASLTYLKLDAETIKGTYDQNPTPGGNNQEKVVIETGHIANLRRMCLVARQTLPDIQVKPTALQRLVSLHLISETDDYCPSANVICKANPQDDNEPAPFTSLQEVSLNATVPENLRDSWRNAARDHPKRPRILFIQHPHRAG

SEQ ID NO: 68980 - protein, 318 aa, Zea Mays
MPVRRRQPRRPETGAAERYREMGIGAALSRPWDYPTACGELAALLRLGYADLPKAAQALVASDVLLAFRLLPDVQTGYAVSTANVLLQAVEVALPKQKKAQAVSEFKHSIIAHKRRARVQQISGSPHIPQDILVHIFSFLDMHSLVAAGLVCWSWNSAANDNKLWKMNYSIFFGLSHLSCNNIPVSGVQYSTNSVPNYPNFSWKESFHTKYAECASWKFVSNRALCAHCRSVIWLSNLTCASPHHCPKNRHHEVKLRPLLPDTGVELGSVVPSEERDAAAPGARRWGAGRNRNNDDDGVVYRGSWFGNDRPMLIVLNG

SEQ ID NO: 68981 - protein, 66 aa, Zea Mays
MWSLIKFFFFLLLLNLTLSHENHMKRCMRSYTYVLLFFYKNPLMLIQHYTTSVFIYVTLYNSTLYW

SEQ ID NO: 68982 - protein, 306 aa, Zea Mays
MAAERDIDDLPRNDANYTALTPLWFLERAALTHPARASVVHGPVRYTWADTYSRCRRLASALARRSVGHGSTVAVIAPNIPAIYEAHFGVPMAGAVVNCVNIRLNAATVAFLLEHSSAEVVMVDQEFFTLAEDSLRIIADKKKGTFEQPLLIVIGDATCDPTTLQDALRKGAIDYEAFLESGDPEFAWRPPQDEWKSIALGYTSGTTSNPKGVVLHHRGAYLMSLSGALIWGMNEGAVYLWTLPMFHCNGWCYTWTLAALCGTSICLRQKVICTTSRTRAQVKSGHQKRHSGNLLMLMSQGLLSAC

SEQ ID NO: 68983 - protein, 198 aa, Zea Mays
MRRLKGSLRSFCMSMNQQAQLKFCLRTSFVRVYDRANSIFWTRALNIPLPHSYVFLGSCGDQQARADNDAHQEIDITAKDCSADENSKPSNTESIWVEGLVPGIDFCNHNVKALATWEVDSVGNATGIPASMYLLLADKSPAETGAEICINYGNKGNEELLYLYGFVVDNNPDDYLMVTLIMMFIILWKLLDRSSLLI

SEQ ID NO: 68984 - protein, 86 aa, Zea Mays
MILRFCYYVKHVGSTTRDLLFYPNSRDRLTTQGMSTSWRPLGSSTTTASELRTSDAHLEYRSSGSTQIAQACPSLRALVELEMRKP

SEQ ID NO: 68985 - protein, 90 aa, Zea Mays
MEGGERRPRARSKEVRLGRRSSHGARGRARREQRGRPSWRASNASELARGEAAGAATMAGAGTRRGTAAAGRGRSQQPSPARNGVGARPK

SEQ ID NO: 68986 - protein, 446 aa, Zea Mays
MASPAGGESPAKPVLLHGDLDLWILEARLLPNMDMFSEHVRRCFAACRPPSSCGTKHPPPAAAGRRHHHHHRNIITSDPYVTLSVSGAVVARTAVIPNSQDPVWEERFAVPLAHRAADLEFQVKDNDTFGAQLIGTVAVPADRVVSGDEVEDWFPVIGTNGKPYKPDTALRLRFKFQPIADNPAYRHGIAGDPDHRGIQDSYFPLRHGGQLTLYQDAHVREGDLPEIELDNGKTFQHNACWEDICHAILEAHHMIYIVGWSVYDKVRLVREPSPSRPLPEGGDLTLGDLLKFKSQEGVRVCLLVWDDKTSHDKFFIKTGGVMATHDEETRKFFKHSSVICVLSPRYASNKLSIFKQQVVGTLFTHHQKCVLVDTQARGNKRKITAFIGGLDLCDGRYDTPEHRLFKDLDTVFQNDYHNPTFSVQRVPGNHGMIYIAGLMALLPMMS

SEQ ID NO: 68987 - protein, 758 aa, Zea Mays
MTVWYDLLQWRNEMYNSVIDAFKDFGQTNPQLHHLGYRDKAWNVNKLAHIARKQGLPEVCVTILDKMYGHATMEVQEAFVKICEQAKAYLEMKGELVSGLNLINNTNLEFFPVKNKAEIFRLRGDFLLKMNECETANQSYSNAITLFKHLPKGWISWGNYCDMVFKETKDEVWLEYAVSCFFQGIKYGVSNSRSHLARILYLLSFDGQNEPVGRALDKYLEQLPHWVWLSWIPQLLLSLQRSEAQHCKLVLMKIAQVYPQALYYWLRTYLMERRDVATKTEIGRNMLAQQRMQQAMMANNAANNLPDGSARASNHAGSNMTSDNQSHQASQSVGAAGSHDGGNVQGQDPERSTPEGGTNTSHDQGQQSSTGAEGSQVPLRRNSGHGWVTSAASAFDAAKDIMEALRSKHTNLANELELLLSEIGSRFVTLPEERLLAVVNALLHRCYKYPTATTGEVPQSLKKELSGVCRACFSQDAVNKHVDFVKEYKQDFERDLDPESATTFPATLAELTERLKHWKNILQSNVEDRFPAVLKLEEESKTLRDFHVVDIELPGQYFTDQEIAPDHTVKLDRVGPDIPIVRRHGSSFRRLTLIGSDGSQRHFIVQTSLTPNARSDERMLQLFRVLNKMFDKHKESRRRHLAIHTPIIIPVWSQSSLIKPFQGSSLLKQLWSYVCKHTMRLQKILLMIIFSPNICTRFCQLATTCGPSRNNLQSKWLSPASCRICCRLAAGLLTKFYLLKILGRSSRLTSIQLMIQMG

SEQ ID NO: 68988 - protein, 520 aa, Zea Mays
MLIKEPGLGAREMQYRLEDQFTVTLSYNKVWEGRKLALKELHGTWEDSFKLLWNWKAAVEATCPGSLIEIDCKKVKGQMHFSKMFVALRPCVNGFLMGCRPYLGVDSTHLTGKYLGQLASATAIDGHNWMYPVAYAIFDKETNLNWKWFMTLLKRAIGTPPGLTIHTDACKGLAYGVSQVFGDAAEHRECFRHLMANFRRKYNGEVLKYMWPCAWACTHERHQVLMDKISETCPNAVAYLRYDHPHLWTRAKFNKICKVDYVNNNISECFNNWIKNVKELPAVDLMDMLRVMIMEKIATRQSIANKMQGHILPSVVNDLHEKSRNLRYTITKSGYMKGEVSGASRDGVAWRYGVNLVTQACSCGQWDVTGKPCTHAIAFITSQRNLRIEDYVGECYSVQRFKDAYQFEVYPMGDRLQWPKLDPGFEMRPPKLEGRPAGRPRKKRIKSAGEPGKRGPYQCKRCFQYGHIEKGCKNPVVEPHEDLPDNHLQRKTKKGTKKRKVSQNRLQLHLFKYRHLVLDQ

SEQ ID NO: 68989 - protein, 480 aa, Zea Mays
MKEAWEVLRTGSKARVVGSTNANEHSSRSHCIHCVMVKGENLMNGECTKSKLWLIDLAGSERVAKTDAQGERLKEAQNINKSLSALGDVISALATKTSHIPFRNSKLTHLLQDSLSGDSKTLMFVQISPNENDVGETLCSLNFASRVRGIELGQAKKQVDVGELSRYKLMVGRAKQDSKNKDAQIKSMEERIQALEVKNKAKDLLTLNLQEKIKELESQLLVERKIARQHVDNKIAQDHLQKQHGMKEENNSYLRSPMAERNLNSTAEKAAATPKGLCISKQMFSDSNTDAYSFKQLMSLGEEEEKENNPEAAAQLPAPSTKARRVSLGNGGGYQQPLKPISRRTSLIPLPRHNSLLPMPTAAAAAVSPLDRITENLSSRSPSPCSPPVVSVDKGSRSRRVSSLLRRSLQKKVVIRPSVAAQAAKKAGAAAPAAQGTDSSARRAARRVPASGGGVGGQKVRQQNRDKERGWNNGTSLRNF

SEQ ID NO: 68990 - protein, 125 aa, Zea Mays
MESLKFYCMASEKKQSNPMREMKVQKLALNISVSESGDRLTRAAKVLEQLSDQSPVFSKARYTVRSFGIRRNEKIACYVTVQGEKAMQLLESGLKVKENELLRRNFSDTGCFGFGIQEHIDLGIK

SEQ ID NO: 68991 - protein, 768 aa, Zea Mays
MPANGKLSAKPSPSPMVAPASRPKFTAVTFLGDCDDDDDFQPPRPRPLKPCIGAAALRFRKKLKAPSSGKENSSAAGGAVTVVGVASTAVKDAETLAAGSRVSGDVPKTKRRKTGESCGLSRYGSDSTKLSCKPKIELDRYGYGKGCCSFLPSAIDSTVLALGAVCDFGVRRCDEAQIAVSRHCTSVLEAGHATEELTPTGSGCDPPKTEKKPGSSEAVEGHHDSRLIEPRLVESDANLEFVTGILGSLTDKQDTKKANGVVFGCGVGFQNGNYHLDSLQPELLTSNSKYDSRVCVSNEIQEPGLGACNLISQERKVAAGHSACATPENVTAENKSSAPEACKGQCHSDSSASKLPESHMIHDFEVDGCDNFEIGTQLSELINLCMKDSIEGQSNFGAAPMEQNTLDSKRLSSDYEAKCPLCGSDISDLSEELRQLHTNNCLDEPAKGKHGVVVRAVSLVPSVVGLKQSLRICGRKESSPNHKKEPSVGQNVETGRVVEWLRNLGLSKYEEVFIREEVDWETLQWLTEEDLLGIGISSLGPRKKIIHALGELLKKHDDPSEMEAVLNSGNTKKTKLPMNGNKLITEYFQCSSFDQRQRRVCKANKPSNLNEKKISSAKVPTRRTAGKGKIKDTPLWCCIPGTPFRVDAFRYLRGDCSHWFLTHFHVDHYQGLTRSFCHGKIYCSSITASLVHHKIGIPWDRLHVLTLNEKLNIAGVNLICFDANHCPGSIIILFEPPNGCFAHWRFPFFFQDGQQSCFAVFLCPHSNT

SEQ ID NO: 68992 - protein, 242 aa, Zea Mays
MEVASGDEDLESLLQNFHRVSQVQVLRVNCSTEFKRREALESHITDLKKDNERLRRQYTETLFKVTNQVKFRAEAQSLKEELDKANSRLLSMEEEHKRETEQLKHSSEMNINALENKLSHALVQQARDEAAMKQLKLELSAHKSHIDMLGSRLEQVTNDVHSQYKNEIQDLRDVVSVEQEEKKDIHRKLQNVENELRITRMKQAEQQRDSVSVQHVETLKQKVMRLRKENESLKRRLASSEV

SEQ ID NO: 68993 - protein, 588 aa, Zea Mays
MLTVPSSPLSPTNGGSVKIVQMTPITSAMTTAKWLREVISSLPEKPSSKLQQLMSSCDRDLTNAVTERVSIVLEAIFPTKSSADRGGSLGLNCANAFDTLWADARKMEASKLYYRVLEAICRAELQNSNVNNLTPLLSNERFHRCLIACSAELVLATHKTVIMMFPAVLESTGLTSFDLSKIIENFVRHEETLPRELKRHLNSLEEQILESMAWEKGSSLYNSLIVARPSVASEINRFGLLAESMPSLDDLVARQNIHIEGLPATPSKKRAAGRDDNADPRSPKRPCNESRSTVVEHNLQTPPPKQCHMVLTSLKAKCHPLQSTFASPTVSNPVGGNEKCADVTIQIFFSKILKLAAIRIRNLCERIQYMEQTERVYNVFKQILDQQTTLFFNRHIDQLILCCLYGVAKVCQLELSFREILNNYKKEAQCKPEVFLSIYIGSRNHNGVLISRHVDIITFYNEVFVPAAKPFLVSLISSGTRPEDKKNASGQVPGSPKLSPFPNLPDMSPKKVSASHNVYVSPLRQTKMDLLLSPSSRSFYACIGEGTHAYQSPSKDLAAINSRLNYNGRRVNSRLNFDMVCLMLTLLL

SEQ ID NO: 68994 - protein, 90 aa, Zea Mays
MGKLSLGRTNTRKAGLQWEWRDGESIVYPPGKRLDGGVLSSRLAGTCSGLKKPVGELTYARVKCYICRVVGDPQLSINRFGSLLLLGYED

SEQ ID NO: 68995 - protein, 650 aa, Zea Mays
MDPPPATRAASRRRDRRRRLRQRQRAAAATKTKVGAAVLAVEPQSAAVTTPVASIGPAATPASRGRKRRRPRRRRGRNAGAAGVSDEPPAASPVPVPDAPQASCNLEAMASRLSDNVLQTMTEKIMRSDKTSKRNFQHGNEALKDSVAEGAACSSLARREHSTRENGASRSKILKRSNVKSPVDSCTEQGTDMDYHKMKSADLLGNLEEVYQERTCLGYCSSQKLEEYWENENVSSLNSSSLQAGKKRKKRRGRKKHNRRKKANLQDSPASTAADNSGLVTFSENCTSALKLEEQRKKQDQNKTSMTNLLLINNAKRSEPFDVNLEGAIEKSCELAKNSFDNTLENRYELAKNSFDNTLENRYELAKSNSDYINMVRNGLQEQDLACLSNSHNVNYLKPSHLAEEYTEKLKHVFSLGKSLRPPKKKLLILDLNGLLVDINEDYHNAHMADAKVRRKLVFRRPYCDDFLNFCALNFELGIWSSRKKENVDSVVNIVMSEFKPHLLFCWYVQDMSKCTFTGHKTLENKHKPLVLKELRKLWNVEEQDLPWEVGDYSPSNTLLVDDSPYKALRNPPHTAIFPHSYSYLNWNDDSLGPNGDLRVYLQNLAAADNVQHFVRDNPFGQPFITESDPHWNFYAQIADRGRAPLTCCA

SEQ ID NO: 68996 - protein, 398 aa, Zea Mays
MGVQRASGVSLLHALLVVFWALSSRRAKGQNPSGHLSVDASPQNVRKIPDKMFGIFFEEINHAGAGGLWSELVSNRGFEAGGPNTPSNIDPWLIIGDESSIIVGTDRTSCFERNPVALRMEVLCGSKKTNACPSGGVGVYNPGYWGMNIEKGKVYKVSLHVRSSDALSLTASLTSSDGLQKLAAHTITGSKKTFAKWTKVEFHLRSNQNNSNSRFQLTTSKSGVVWLDQVSVMPMDTYMGHGFRKDLASMLANLEPQFLKFPGGNYAMGNYLRNAFRWSETVGPWEERPGHFNDAWGYWTDDGLGFFEFLQLAEDLGASPVWVVNDGASLNEEVSTKTIASLVKDVVNGIEFASGGPKTTWGSVRAAMGHPEPFKLDYVSIGNQECWMLYYRGLHLFD

SEQ ID NO: 68997 - protein, 689 aa, Zea Mays
MAADALSIIPGAVLRNLSDKLYEKRKNAALEIEGIVKQLATFGEHEKISAVISLLTNDFTYSPQANHRKQIVPPVLTSFLDQDSRVRYYACEALYNIAKVVRGDFIIYFNKIFDALCKLSADSDANVQSAAHLLDKLVKDIVTESDQFSIEEFIPLLRERMNVLNPYVRQFLVGWITVLDSVPDIDMLGFLPDFLDGLFNMLSDSSHEIRQQADAALSEFLQEIKNSPNVDYGRMAEILVRRAGSTDEFTRLTSITWINEFVKLGGEQLVPYYADILGAVLPCISDEEEKIRVVARETNEELRAIKADPAEGFDIGAILSIAKRELNSEHEATRIEALHWFFTLLDRYCAEFLAYLNDIFDPLLNALSDPSDAVVLLVLEVHARIAEESHHFHHLVSYLIRTFHNNHFVLEKRGALIVRRLCVLLGAEKVYREFSTILESEVDLDFASVMVQVLNLILLTSTELGELRSPLKKSLVDSCGKDLFQSLYASWRHSPMATISLCLLAQAYNHASCVIQSLGEEDINVNFLVQLDKLIRLLETPVFAYLRLQLLEPGKHTWLLKTLYGLLMLLPQQSAAFKILRTRLKTVPFSENLKRTSSANPYSQILQVTEDGNRNQDMQNYSAINFPFLLQQFENMQLQHRNHLKDQLQSRKSASTLTLSQEIQRYEEAHSSSLSEINRPPSRTSKGIL

SEQ ID NO: 68998 - protein, 649 aa, Zea Mays
MVSTQSSSTLLEVVEWLEYAPTFLSGSEFENACLFVDGFLASRTFLVGHGLTIADIAVWSNLAGIGQRWESLRKSKKYQNLVRWFNSIDSEYKEALNEVVAAFVGKRGIGKSPAPSLKEKVHDSKDPSAPEVDLPGAKVGKVCVRFAPEPSGYLHIGHAKAALLNKYFAERYQGRLIVRFDDTNPSKESNEFVENLLKDIETLGIKYDAVTYTSDYFPKLMEMAESLIKQGKAYIDDTPKEQMRKERMDGIESRCRNNTVEENLSLWKEMVNGTERGMQCCVRGKLDMQDPNKSLRDPVYYRCNTDPHHRVGSKYKVYPTYDFACPFVDALEGVTHALRSSEYHDRNAQYYRILQDMGLRRVEIYEFSRLNMVYTLLSKRKLLWFVQNKKVEDWTDPRFPTVQGIVRRGLKVDALIQFILQQGASKNLNLMEWDKLWTINKKIIDPVCARHTAVLKDQRVIFTLTNGPEEPFVRILPRHKKFEGAGKKATTFANRIWLDYADAAAISKGEEVTLMDWGNAIVKEIKVESGVITELVGELHLEGSVKTTKLKITWLADIEELVPLSLVEFDYLISKKKLEEDEDFLDNLNPCTRREIPALGDANMRNIKRGEVIQLERKGYYRCDAPFIRSSKPVVLFAIPDGRQQASLS

SEQ ID NO: 68999 - protein, 365 aa, Zea Mays
MAKPSVAVPEVGVPAAQASCTCPGTLLAYPPPRGAGVAAAVRRKCLQVELGAGAGLLGGAGAWGVESMRASSPTHARAAAALAAGGGVDVDVDEERAASWMARHPSALGRFERIVAAAEGKRIVMFLDYDGTLSPIVDDPDAAFMSETVFEFVKLAELYYAGSHGMDIKGPAAAKASSSSRHAAKAKGVVFQPASEFLPMIEEVHERLVQTTRCIPGAKVENNRFCVSVHFRRVDEKMWGELSESVRGVLRGYPKLRLTHGRMVLEVRPSIKWDKGKALEFLLESLGFADCSSVLPVYIGDDRTDEDAFKVLRRRGQDQGVGILVSKHPKETSASYSLQGPAEVMEFLLRLVEWKRLSRARLRLQ

SEQ ID NO: 69000 - protein, 126 aa, Zea Mays
MRRHSSLLNSVKKLCSTIPEVEGGKIRKVCGHLDHVCKKLEETSIVCEQDLETKNPSWEIDDSPSLDDEHPLDDDELSEGYSTEDPELWEMVFDDLKWEEIKANVSFEEHYRVINYRFEEIIDRNM

SEQ ID NO: 69001 - protein, 317 aa, Zea Mays
MPADGEALAPAVHFWGEHPATEAEFYSAHGTEGESSYFTTPDRPRALVFMVHGYGNDISWTFQSTAVFLARSGFACFAADLPGHGRSHGLRAFVPDLDAAVADLLAFFRAVRAREEHAGLPCFLFGESMGGAICLLIHLRTRPEEWAGAVLVAPMCRISDRIRPPWPLPEILTFVARFAPTAAIVPTADLIEKSVKVPAKRIVAARNPVRYNGRPRLGTVVELLRATDELAKRLGEVSIPFLVVHGSTDEVTDPEVSRALYAAAASKDKTIKIYDGMLHSLLFGEPDENIERVRGDILAWLNERCTAQATHRNIPVE

SEQ ID NO: 69002 - protein, 389 aa, Zea Mays
MDFSAGSYFSSWPINSASESYSLADGSAESYGEGSMPPSTYFMTARSDHNLNFSVHEQDSTMLPNEQLTYAGAGQIDLLPAETLSRDKLPENLLELQGLQNISNLQSNLVAPGVFQHNLTPGVFHPQLNTPGLSELPHALSSSIDSNGSEVSAFLADLNAVSSAPTLCSTFQNASSFMEPVNLEAFSIQGAQSDCVLNRTSHPNGNISDSKEFISGSLPSFASVQETNLAASGFKTQKQEQNAVCNIPTFTARNQMSVAAMQGALVPQKIPSRINDNKSEGPVSHPSDVQTQPNSAVNGVGVKPRVRARRGQATDPHSIAERLRREKISDRMKNLQDLVPNSNKVLFLEGGGGLTCLVHTAGIKFGHGTNYQSFATYIRNKNMYFLVVA

SEQ ID NO: 69003 - protein, 357 aa, Zea Mays
MAAPAVASPSRATPTDIPTAAPSPASPPRRLASAPPAVDASGSSSPASAHSGDQLSAPDASSPLLASRSEEYRLLFRLPPDEVLVQDFNCAVQENILLQGHMYLFLHHICFYSNIFGYETKKCPDIVPVFQKTIPLQEVTDVRKAKTAAIFHNAIEIVAGSRRHFFGSFLSRDEAYRIIVDGWEQHVSDARLLLERQETKSASSSEENGYVVLEGTKESKQDGDLSLPDRSVNSTAVSSSNADGGDSNINISKRFSEVEENGLEDNIVALNPFNLEPVDAPPSVPESYTMISESKFQVPVEVLFNFLLSDGAFGFVDDFHTKCGDKEFSCSKWRTDEQGGLVRDVSFLHPIKIYLGV

SEQ ID NO: 69004 - protein, 336 aa, Zea Mays
MGNTCIGPSAPSDRHSFFNTVSLAVLWRPPAAADRAEPSPTAEPSSSTPCSPPSRAPNPVTISDSEHPPHSTSTALGPAAPPNPNGKPKPKPKVKRVQSAGLLAGSVLKRDSERLKDVYTLGKKLGQGQFGTTYQCVEKATGKHFACKSIAKRKLVTDEDVEDVRREIQIMHHLAGHPNVVSIVGAYEDAVAVHLVMELCAGGELFDRIIQRGHYSEKAAAQLARVIIGVVEACHSLGVMHRDLKPENFLFVNQKEDAPLKAIDFGLSIFFKPALICFAGRGEDLLGQSCKVLDRLFWLFSSLNAVTCKSPACWREKRVKYFLMSLEVLTMLPLRF

SEQ ID NO: 69005 - protein, 89 aa, Zea Mays
MDQKEDLVPRFLFPCIIYFVRIFSFCHQAAIHDLSGKAPCLQLLQRDLRRRWLARAGEEAYVRDAMTRPCPRGRGSGGWRSAECDRPRC

SEQ ID NO: 69006 - protein, 105 aa, Zea Mays
MCFQVNFKPSHRCIERELESSAKTKASTPLHNSSFAVAPSVSPNLVQSSLIYYLPKRRESKRAYISLKYPFLVIHAKGGESISPKQRDRPHHHLILKKWCFQIDI

SEQ ID NO: 69007 - protein, 399 aa, Zea Mays
MSSTTADTSPESVGSCRPPTPPTSLPPHSAPAAALRGAPVRRQLDFADADADSCAGAGGDLDDYDDFLIRAVDDIERGYNEAKRRAPPCVCGRGYCAVQRDDQSGGWMYVCSSQPKCKHVAMCKEVDQNPQSPPVVRSDPKTSNRCAFNVPRTPVNDARTQINNVTLEGAGATTPINVSPQAAVAATPFSYTSKGVGARTPVHVSPQGAHATAAVKVSPQWNRSNDGRWNRSNDGRPICQCTAGKCKILRVGNEDWYVCPIPKGQGACSYKVPVTDAVGAGDNDDANGSANPAQPNDDEWPFDVINDEIVPTPRAVAQQKSPSTPHHQRSGTARTPAPSPVTPFGSRGAMTGRPNDTCFGCGEKGHWISACPKPSPRSRCFRCGVVGHRPANCPQPRGS

SEQ ID NO: 69008 - protein, 620 aa, Zea Mays
MEMDDSHGTMVNKSEENDFEKKGTSDPVVYQLVRVEGDGTLVPATEDDVLQFEHFLHNEKVDLPPIEDADHVEEFFNNDCMLLKKPDLEDGSSKLETVEAHTQKLGANLEENILQSLDDSLSPPSDFRIHSQHSDKLLTEQGANVTRQDNASTETTKSTVLNDSCCAEKYKADACSRSVCDTSTDPSVSGVNSSMPDFSILRGEVCLDDLTIRELQEAFRATFGRQTNVKDKIWLKRRITMGLTNSYDVPSSGCVVKDYKIVGKDAKNDMSDMDERAKTGLRATSVVIYPGNEGDSPSSSYYQSEDQEDSSKRVPIHNDEPQGNLLGEQCTDKRTRKPTKRYIEELSDIETHDSTVKNSSPAKRPAHDELLMNPRVAPFNETGSLGTIYPTRKDTFGGFSVHVPYVSRMRRGRPRKDFISFADKGPSVEPKGIQPSVEMILVKDGDKGNHLRKVPEVPLKVSSENEHAEAVDSKGVRNLQAKVCSAVSKPKIKHGLTRKHHRAWTLSEVVKLVDGVARYGAGKWSEIRKLSFASYSYRTSVDLKDKWRNLIRATQTQLPAQKDGACPRKTNPSIIPIPPSILLRVKELHELQSQGGGFTAPVKFSGQDGKVLQGKGSGFL

SEQ ID NO: 69009 - protein, 410 aa, Zea Mays
MASAAAEAPGASASSAENRLLQSLAERGWRFRDPTDEAIQALLLASPTPSPEAVESELVSMDLRMFGGKCLPDRAAAGGTSKRLSYLHGPVVLQQRRLLRFGLTDGICEAVAIEFSPIPFITEEIAPGTKIRLENRVPINNGILCLSAKNVTVIGGAVQSLYEEWQMNQKYSGLSRPSLRLSPSDDGVGPPPFEKLDIEARPCRETKVQAYPARKLAVTHDHGPVNSGGKPMNEGSNDENRDNIESKVESKQITQDSRPKEVSEAVPVQNQAAAQKLLQKMSQAVPEDRRGRGHRFKGKGKEEDAQVFTLDEWEKRKAISSKPAAESYVHDTSRDEELARQLQEQLDLEDLHGGAGAGVLHGGAESSDAERLRMSMFSFSGPDEAGGGRRDFRGRGRGRGGGRRRGRGRF

SEQ ID NO: 69010 - protein, 596 aa, Zea Mays
MHMEPVKEGEFEEERRKGQNLLPALHMNSAAPAPIKRAGRPASALLGLLLALHLAIAKEQYHEFVVKEATVTRLCGTQQQRIMTVNGQFPGPTVEVAEGDALIVRVRNRGSYNVTVHWHGVRQMRTAWADGPEFVTQCPIRPGTSYTYRFTVAGQEGTLWWHAHSSWLRATVHGALIIRPRAGVPYPFNAGDTPAREITIILGEWWNMNPIDVVRTATRTGAAPNISDALTVNGQPGDLYKCSSNGTTTFSVTSGETNLLRFINAALNTELFVSLAGHTMTVVGADASYTKPYATPVILVAPGQTTDVLVTFDQPPSRYYLAARAYASAQGVPFDNTTTTAIFDYGTGASNSSSPAMPTLPAYNDTATATAFTTSLRGLRAADLPARVDESLFFTVGVGLFNCSSGQTCGGPNNTRFAASINNVSFVLPSTTSILQAHYAYAAGGATPAGVFTADFPANPPVRFDYTAPNVSRALWQPVPGTRLVLQGTNVFAAENHPIHLHGYDFYILAEGFGNFDAAADTASFNMDDPPMRNTVGVPVNGWAVIRFVADNPGVWLMHCHLDVHITWGLAMAFLVEDGVGELQSLEAPPSDLPIC

SEQ ID NO: 69011 - protein, 652 aa, Zea Mays
MATRLASIFSAVRSPTSAPPHTLRRALPSFSYRRAHPSQPRMSSSSAASSAPPAAEKPTVAPFGSWRSPITADVVSGADRRLGGIALAGDGRLLWIEGRPEEKGRMVIVKEEDNPVDVIPQEFAARTLAQEYGGGAFAVDKSVVVFSNYKDQRLYKQTIGTGGPPVPLTPDYGAPNVSYADGVFDPHFDRYVTVMEDRRKDSLNPTTTIAAINLSGSDVHEPKVLISGNDFYAFPRIDQNKKRIAWIEWSHPNMPWDKSELWVGYFAESGDLTKRVCIAGGNRLLIESPSEPKWSPKGELFFVTDRGSGFWNIYKWVEQTNEIVPVYSLDAEFTRPLWVFGISSYDFLGNSDHIVFSYRQQGKSHLGVLDCDSGSISLLDIPFSDLSDVVAADDYFYIEGASASIPRSIAKVTLNESKTKVVNFSIAWSSSPDLVQYRPFFSTPELVEFPTSKSGQKAYAYFYPPSNPNFQGLPDEKPPLLVKTHGGPTAETRAILDLSVQYWTSRGWAYVDVNYGGSTGYGREYRERLLNKWGIVDVDDCCGCARFLVESGKVDGQRLCITGRSAGGYTTLASLAFRDTFKAGASLYGVGDLTLLRAETHKFESHYMDNLVGNERAYYERSPINFVNQFTCPVILFQGLEDKIRHAKYTVP

SEQ ID NO: 69012 - protein, 61 aa, Zea Mays
MTFNFWHCLKRNLIRRDSDVSYGLDVTVEIEKNRRLQIFRPKFETLVSLEEGGSWRCSPGL

SEQ ID NO: 69013 - protein, 132 aa, Zea Mays
MAARRGREWDGDEQGAALPTPAPLGAPVVCLLSSAGDLAAGAFVGSLVGYGKGLITNQGTKACLSIAGSSAKTFAALAGVQSFIMCLLRRLRGKDDMINAGMAGCCTGIALSFPDRRREKSEEQEKRMEDQR

SEQ ID NO: 69014 - protein, 178 aa, Zea Mays
MGNAPRSRSGTKRSTRWLAPVPTPKSESMAVLRASPPPFLPHPLSRPSQCKRRPTCRVVAATARPSPAPSRPRSGGVHGGRPKRGLLAARRRPAEGRVPCLRATEAGVGAAGVAKEEDEYLAREAGWGVRRMARVGEEMRRVAQVQAEAFHVPVALFNDFFFDFFKIRPRCCRRSSTE

SEQ ID NO: 69015 - protein, 338 aa, Zea Mays
MSVSHADEHEISLCDPSSEDDRRRRKIGSLPLKAIHALRKKRARRRVTDFRFPAAISIEDVRDAEEERAVAAFRDRLAAHRLLPDKHDDYHMMLRFLKARKFDSDKAMQMWSEMLRWRKEFGTDTILEDFEFDELNDVLHYYPQGYHGVDREGRPVYIERLGKVDPNKLMQITSVDRYIKYHVQEFERAFRERFPACTLSAKRHIDSTTTILDVHGVGFKNFSKTARELVQRMQRIDSDYYPETLHQMYVVNAGSGFKLIWNSVKGFLDPKTSSKIHVLGSNYQSRLIEVIDSSELPKFLGGSCTCSEKGGCLRSNRGPWNDPVIMKERYLLSVPLQA

SEQ ID NO: 69016 - protein, 100 aa, Zea Mays
MDNMDGAELFGRVLTVNYAFPERIKGGEQGWAAQPIWADADTWFERQQQEEEMQRLQAEHRAAMQAAEKLHREKLAAEREGEKEEDPMAAAEAQAVKQSS

SEQ ID NO: 69017 - protein, 98 aa, Zea Mays
MAARRSTSPARHGVLPALLLILCSSLPSLAAAYRPGDIVPMLRSGQYHGSRSVWFDVVGRHCPAFAVNREVLMPIPKPTGFTGADPYKISTLEMIYLG

SEQ ID NO: 69018 - protein, 69 aa, Zea Mays
MAEGKVRRTIPGCLVIDSTRERHIQPPDGTHKPTTQPKIPANGEEQTGGGADVYLTQGHGSLSPSQLGP

SEQ ID NO: 69019 - protein, 780 aa, Zea Mays
MAPAKRKRAAAAAAAAAAAKWKVGDLVLAKMKGFPAWPAMISEPEQWKMPSTKKKPLVYFYGTKQIAFCNYADLEAFTEEKKRSLLAKRHGKGADFLRAVDEIIEVYDSLKDIGSNKVDLPAEEVKPGVEKFAENNSRMDTEDLVSSSYMHNDRKIEDHYVTTRSHDMVNSDRPSVDERCVVNSAPDEPIENVSILDEMRDISLRTNSFSNKQRDAQPQNCYTRTRVPSLRKSRSSLSLESRKAQGSDNVWLHSGEGTSNQPVTLGASNGNRMLNTPAEVDSTSNREASENGTTETELKSNGTSDLPMNTAVNFKRKRKSDRKPGPHYRDCTTPNKDDQLCAEYSEILPDSPNSKNEVSKSDGDEHLPLVKRARVRMGRSQLEDSPVDEIDVSNKKPELATALDQCDRNGKPASPANDYSADQVSAVVSSAPNLSCKLDTTILSKEGHLPWKNKEYHPKILALDVEAALPPSKRLHRALEAMSANVAENTKNIPEVTGPNEMTLNGSLLTASSLSNKSADAVVTVSNRPVIVQSPEPSLDTQFVHNPSGKCTSESILQNNSIPDSASVPSKENDHIVLKGDICEETLMDTKTANGSWDCSELNNDSCGKTSALCMKLNRPALNVTQATSVPDRLSSSLEKASENVAASGVKETKTFGSAVCDVDRSAEPIDRSNNNVTSNTMRHSETIVADSVNNVGDTASNSSLATKSSSIQSDADTRTSELHTFSSLALKELNHRKIKDRSTSPDSMPMKELIAVAQARRPTQAVVTLKSDNQVYFWK

SEQ ID NO: 69020 - protein, 353 aa, Zea Mays
MKHQPPRRWGVVAAVVALVLLACLQIQYHHLKVDLGKAGFASATQENNAIRSRNRIRWGPDRNGAHSLPRGIVHRHSDMSLRPLWEDDTASTHKNKNSDYSALLAMAVGISQIKNIDTMARKFLKENYAVMLFHYDGNVDGWRHLEWSDKAIHILAHNQTKWWFAKRFLHPDVMAIYDFIFLWDEDLGVENFNPRRYLDIMVSEGLEITQPALDPDLSTDIHHRITIRNKMAKVHRRIYDNRPSMNCSDESKGPPCTGWVEGMAPVFSRTAWKCVWHLIQNDLIHGWGLDMKLGYCAQGDRTEKVGVIDSEYVVHQGIPSLGGPSLSSKVLDISATNYFFRNLESGRTKDEVY

SEQ ID NO: 69021 - protein, 595 aa, Zea Mays
MQKTEFLKALSDMWKDFDSRVLRYKVLPPLCAELRNMVMQPMILPMVLTIAESQDKGDFELATLPALVPVFASASGETLLLLVKHADLIINKATQEHLISHVLPMLVRAYDDNDPRLQEEVLRRTVPLSRQLDTKLVNKAVLPRVHGLALKTTVAAVRVNALRCLGDLVPSLDKEGIMGILETVRRCTAVDHTAPTLMCTLGVANAIYKQCGVEFAAEYVIPLIFPLLTAHQLNVQQFAKYMLFVKDITSKIEEKRGVTVTDNGNTEVKSSPSLANGIHSEPMSGQIPVAKSSPAWDEDWGPTKKSGVPSLSVDSSAQTKQPSVDPFDFGTQTKQSTTLPFDLSTQAKQPPSVSHVTAATIPPAQPQPSLQSLAASSGPKISGSCVPVDIEWPPRRSSSSNFNAPLSISKDNGSGRLSSDGVDDIDPFADWPPIPSNVNSISATEHWPSINQNISGFSSGNIVFGGSGNSVGQTKSNQMSWSNTSNLMGTNSTGSYLNQGSAALGFGNPNGGLSTGLSNPSSSSTGLSMMLPKSDSGSLSTSVNNAAHGLLRLAPPPSTSVGRGRGRNQGQSALSRASRPHANSASGQQPILDLL

SEQ ID NO: 69022 - protein, 90 aa, Zea Mays
MVVICANALFCWSRIWRRVSAMEGWLGSSSRPNIDVDARGVVFDTKLIWRWCLGLFNGDWRRWAWGMERRGYGGRGQLVSRLAGSARVTK

SEQ ID NO: 69023 - protein, 113 aa, Zea Mays
MRMERTARLVVGHRPCGVTAAWQWHVAAATVWAWQIVYTPAVAHAGRSHGGAGEQLVGGDAPALHDVLPESRDVDVGDVVRPVHAPHVEVEPRPLRRRHGREQRLRVGVVEAA

SEQ ID NO: 69024 - protein, 325 aa, Zea Mays
MEGRGAEQAPEAAAEVKNPRCFMDVTIGGEMEGRIVVELYASVVPRTAENFRALCTGEKGIGAASGKPLHFKGSCFHRVIKGFMIQGGDTTAGDGTGGESIYGSKFEDENFVLKHERKGMLSMANSGPNTNGSQFFITTTRTPHLDGKHVVFGRVMKGMGVVRSIEHVSVGEADCPTLEVKIVDCGELPEGADDGVVNFFKDGDTYPDWPNDLEEKPAEVSWWMDAVESAKAYGNDNFKKQDYKAALRKYRKALRYLDLCWEKEEIDEDKSTALRKTKSIILTNSSACKLKLGDSSGALLDADFALREREGNAKAFFRQGQCRSA

SEQ ID NO: 69025 - protein, 174 aa, Zea Mays
MTAAEVEAAKDIAEEKAVVPLPPSPAKPADDDSKAIVALVVKAIIGGSTERDAYLAKIVSEKRLSLITAWEESQKARADNRAAKKLAFITSWENAKKAEMEAELRKIEEQLQKKKAAYEEKLKNKLAMLHRTAEERRAQTEARRGEETILAEEMAAKYRAKGEGPTKLFGLLKA

SEQ ID NO: 69026 - protein, 349 aa, Zea Mays
MSLRTQCACSCMLQPYSASSSSITLSMRATPTHQRRARPPPPSCLATRHLRRRRAPAGINRVPNLGSAVSTKKAGMSKDTFINLDVSHHRAVAVVRLLRIEKGKAFVDLLNEKANDSGDKEIGYVQRTLGFSTRYLEDRDIRLVTVIVAGTVRWKRYLDYLIMSLCSEEKVFREMEPLLLQILRIGFFEILKLDVPAYAAVDENVRLAKVALRPGAGNMVNAILRKLVLLKETDSLPLPKIEGDDRAQARALSIIYSHPVWMVRRWIRFHGKDEALRLMNWNNSDPHFSLRVNTSKGYTRADLVKRLESLQVHYEESIMDEFVRIREGMQCTHILNGRRFTWSNQRIVP

SEQ ID NO: 69027 - protein, 127 aa, Zea Mays
MKARRCMAGGRSENRQGRAGTWARGAGRRELRERDPSREPAARRSYRDRHRGRRQEQGRHRCVCRELDDGRQRELGAAMDAGRGEIEAARHGEREGEKSREGADRGRWERRRELHGALKLQKMSAPA

SEQ ID NO: 69028 - protein, 893 aa, Zea Mays
MPGRQGMEPASAAARAPRPPSFASQTNALLRKNLIFQKRNRKGTIRLIIVPIYLCLIISVLQRVINSFLDKPKFRCGCKCIDDANGSTAPCQNVCGIQYSTLDQAPSCPIPNPPKWPALVQVPLPEYRAVQDSSGLFTGFPDASCRKTQSCPASIPFAGANTTLSNSIMQNLLTSSPLLNLSDYTSISSLLLGTDVPGSSTGFVEPAFISARPIYVLQPQCKSGDSVTIPITVGSVNAQKEIKCVQGLPLWRNSSITINEETFRGYRKGKTAKGINEIAMGYDFQDSNENHFNVLTLYNSTYENASFIPMPFALLRIPHSLNAVSNAYLQLIQGSGVKMLLDFTKEMPKQATRLTFDFSAVAGVNFFKINDYSIQFVFFFSFINLQIVLAFLASSFFSKVNTAQAIAYLYIFGSGLMAGYLIRNFIEGGKFPRHWITVLEIIPAFSLYRGLYELGQYAVRSSETGSPGMRWSDLNDHMNGMRDVLIIIILEWLVLLPVAYYFDYASSVGHRSSPLSIIKHLLKKDPTWRRITANEIDGKDVHIEMEKVDIIKEREAVDQVLQQQQTSGYAVVCDDLRKVYHGKDGNPDKFAVQGVSLALPYGECLGILGPNGAGKSSFISMMIGFVKPTSGNAFVRGFSIQNDMEKIYSSMGVCPQNDMLWETLTGREHLQFYGRLKGLSGSSLDLVVDESLRSVNLLHGGAPDKQVKKYSGGMRRRLSVAISLIGDAKVVYMDEPSTGLDPASRKSLWSAVKQAKQDRAIILTTHSMEEAETLCDRLCIMVDGKLQCIGTPKELIARYGGYYVLTMTTLPEFEQEVEDLVRRLSPSSRKVYHLSGTQKHELPKQEARISDVFMAVESFKKRVEVQAWGLADTTMEDVFVKVAKGAQSSEELS

SEQ ID NO: 69029 - protein, 156 aa, Zea Mays
MPDVQPLVSDFVLKLKRRKVEGSHAVARQTAELLRSVVSQHRMGSSANQAATLADAVRAVGEQLIAANPIELAVGNIVRRVLHIIKEEDISSTAVGIEGLSVTVDSDDEYDSEHDDRPALSAAVLAAHARNALRAPSLQTLLEDIPQLEIRAQLEN

SEQ ID NO: 69030 - protein, 318 aa, Zea Mays
MADDPNMNFGAFSQSLCNQHVVSFQTSVATSGSGGMPTYLDCSTGMDASVGMLTTPSVVVSTGSSNMPADSGQSLKYGGPLAADWTQVELEILRDGMEKYVHEQGIMKYIKIAASLPNKTVRDVAMRCQWVGKKVNTRRRKPQEHHTGRNTKERKDKFVEPALWGTNHPLQTGMTASSFVPHNGQNAMFISGGYINTAANTRVTELLHFINDSIAKFIAASEIDRPVLHLLEENNRLLNQIETNIQRFQPHNNIDLFHRARRNINDLVQITTQLPGLRTKMPPLTVAIDENLASFVLPGITMDQVLGSNDLKEEPRGW

SEQ ID NO: 69031 - protein, 444 aa, Zea Mays
MLLCNSHLISITAATYKIQAAARVIRIGSRTDFMLGDILHPAINWADKESHLDPDEMAKMKSAFIGNLPEDVNEEYLRKLFGQFGEVVRVAISRKGQCPVAFVHFAKRSELENAIEEMDGKTVRGPGRGPSFKIQVSVARPTADNDKKRSREEVRTRRSNASGDRRDYSHGRYGHDSLDRQVKAPRLSNYVADAADPYESAVNSLPSAVKEVLLRILRLRIGTRYDFLISGGDKHNKGDYFASLVAKAETFGLTHALHGTTYLSRNPEMHSKRYPHEDYDFVTPSRYDSSAHHPSTYYEDDPPVSESRVRRYAEERSTIVRSPEPRPRYDETDIRINPEPRLPYESRHNAEKHLDRRYIQEHSSNIERPAEEALLSRERRFLPAAGYMPNPGGSDFRSRSPAEYSAQRQQMRFDPFTGEPYKFDPFTGEPIRPDPNQRRSGSLY

SEQ ID NO: 69032 - protein, 99 aa, Zea Mays
MVNSFLVTWPSNRRKKIDIADQRNSSGPRLVRESVGLFILHLEGHRRKSLFISHQNLQLSEGQLKKGKASDAYAHKLKVNHVPVFVQEKGSDWAVDLAT

SEQ ID NO: 69033 - protein, 353 aa, Zea Mays
MPPPLQAHRLLISHRRLPTPARRRFTAASSVQSAPATTLAPGPATSSILSIRESLLSGERTAADITSEYLSRLRRTEPTLRSFIHVADAAAEREAEELDRRIASGEKDAVGPLAGVLVGVKDNLCTANMPSTGGSRILDGYRPAYDATAVRRLREAGAIVLGKTNLDEFGMGSTTEGSAFQVTTNPWDDSRVPGGSSGGSAAAVSARQCVVSLGSDTGGSVRQPASFCGVVGLKPTYGRVSRFGLMAYASSLDVVGCFGSSVFDTATILSVVAGHDKMDATSSSQVVPEYASELVSLDLLESKPLNGVRIGIIQETLGEGVASGVVSSIKGAASHLEQLGSVVEEVWRTGLGG

SEQ ID NO: 69034 - protein, 557 aa, Zea Mays
MGGPVKDANDMLTRWLEKSTELRTSLQTSLLPIGCIKIGLSHHRALLFKILAYSVGIPCKLVKGSNYTGGDDDDAINIIKMDNEREFLVDLMAAPGALIPADILSWKGNSLNSNRKLGLNRTAGSSSTVDANVDPTVLPLEPKGGQLPLFSSGDWMSDIDSGYEAAEIAASTQTSSGVTPYLCSAGSVFGSSWMLVNHDQSDGPSTSAGTSSQQKVVPQSEHQRNLNRLPDLQEIPESKNLFADLVPSGDNKSKKTSVPFKGPDHRNNELQKRRENIVPNAGRPHQRLVMKNWSPYNDVSNNKQYNYVEDSFARRNVGNNAAPSSSQMPRPAARSNLNSRLHNDASYHNYDSIMAGTSAMNITSTAETGKVPERVMRGDLDKGQTNYRLEDQHVIVQPPQGRLPWGIPAEGSVPMNRVQSQAKQHLENMDAKQDHKKLLPDPKKSPLDKFMDTSLPSRNMDMRSQRLDFDDVSECEIPWEDLVIGERIGLGSYGEIYCADWNGTEVAVKKFLDQDFYGDALDEFRSEVDSNYASAAPSKYCSLYGCCYTPSELIYCI

SEQ ID NO: 69035 - protein, 378 aa, Zea Mays
MEVPAPPAWASPLATTTTILLVTAALVLVTTTVLRRRAHRHRKRQRQAPPGPRPWPVIGNLNLLGALPHRSIHELSARYGPLMSLRFGSFPVVVGSSVEVAEVVLRTQDLAYLDRPRMACGKYTVYNYSGMLWSHYGPYWRQLRKLWVTELLSARQLRLTERVRARSSRMLRDLHPHPVTVPQHAGGAQNAGHYVGEDDAGGPGAAATPEEFRWMIEEIFFLNGALHVGDMVPWLGWLDAHGYVGRMKRLAGKAPRSCPGTWSTCCCSSPTTATAARGASSRCRSTATASRRPCWSSSPVARTRRHRGAGPRGGPRPPGRRGRHPRPAVPGRRRQGVHAAAPRGAAPDPAGGPRAHDGGRVRRPRGHARARQRLGHRP

SEQ ID NO: 69036 - protein, 219 aa, Zea Mays
MQCFIKRNKNNSTFYLYLGFTSSPVDKGKFLMAARRFRRGPHTEYIISLDAEDLSQGSNAYMGKLRSDFWGTNFKIYDSKPPYDGAKASSSRSSRRFGSRRISPQVSAGNYEVGQVSYKYNLLKSRGPRRMYCTLECPSAQETWENSLKTKFRRPLGPTTLRNKAPRWHEHLQCWCLNFHGRFGKVDSDMFTMDYRQPLSAFQAFAISLSSFGTKLACE

SEQ ID NO: 69037 - protein, 456 aa, Zea Mays
MEGFDETFEVSSKGENKNRKGLLNWFKLRKHDGGSNAPSLGGDQSSLRKALAAPWTPVEIGLNSQTEQEMSNSPENLSANLLSIDHEEFHSDGLYGEEASLVTRKTSDHVDLLREQLKILSEEVALHKSVLKRLVEGAGRSTMNGHVEIEMKKVSDEIKDKQQQIAHLERQIKGELDQLEHTPSHATLLEQVNEKAFELEVKTADNRILQDQLQQKTRECQALEETVAHLHEQLSQALEANDLLSESIIFQQYTDNNLQTGSQIHIENPESIDISDELHQKAEQSEIDELKQRLCELTEAKTQLETHNQKLQEESMYAKGLASAAGVELKALSGEVTKLMNHNERLANDLALARNSTRVRSGHRVGRRDSYTKRLEPASRRDVHASSERESALEVMLMAKDQREAELQKKIEESKQKEAFLEGELANMWVLVAKLKKGQVIDQDDVSMPYPMDRDS

SEQ ID NO: 69038 - protein, 225 aa, Zea Mays
MAGLSLLCGDCGAQLRSVEEAQAHAEATNHANFVESTEAVLNFVCSDCGKPCRSQTEVDLHTKRTGHTEFADKTAEAAKPIDLEAPLKPASEDVMDVDTSASASGEPQEMVVPEVNKEMLTDLEGMGFSTARATRVLHFSGNSTIEGAINWLSEHQEDIDIDEMPLVPANSKTEDNKPSLTPEEMKIKAQELRDRARKKKEEEERRMEREREKMLSSVMCGRTYT

SEQ ID NO: 69039 - protein, 818 aa, Zea Mays
MQQPVDGTVMGNFFGASSPSVSVNNLAAGYLGEMQPTGANFTSHFATRNDIASVFNDTGSELGGGPKTSIDSVLLGEPFPEYPGGFMESTLYSSVATLGNSLEDGLQTFMSEALYTNNLTQKEVDALGAAGITSSKTENDGYTDQSVRYPLLKQSSSDLFKMEPDGLKKFDSFSRWMSNELPEVVDLDIKSSSDAFWSTTETVNVADGSSIPINEPLDVFVVSPSLSQDQLFSIIDVSPSWAYNGTKTKVLITGTFLAKKEDVENCSWSCMFGDSEVSAEVLVDGSLRCYTPVHHSGRVPFYVTCSNRVACSEVREFEFRDSETHYMDISDKHTTGINEMHLRIRLDKLLSLEPEDYEKYVLSNGNKSELINTISSLMLDNNLSNLALPSDEKELCTVQDQNLEKQVKEKLYYWLIHKIHDDGKGPNVLGKEGQGAIHLVAALGYDWAIKPIVAAGVNINFRDIRGWTALHWAACCGRERTVGALIASGAASGALTDPTQQYPSGRTPADLASENGHKGIAGFLAESALTSHLSALTLKESPSGNVEEICGLTAAEGFAASSSSQLACVNSQEESLKDSLGAVRKSTQAAARIFQAFRVESFHRKKVIEYGDDDCGLSDERTLSLVSLRNPKSGHGDSHSAAVRIQNKFRGWKGRKEFMLIRQKIVKIQAHVRGHQVRKNYRKVVWSVGIVEKVILRWRRKGRGLRGFQPEKQLEGPSWQIQPAKAEAEDEYDFLKDGRKQATGRLDRALARVRSMNQYPEARDQYRRLQACVNSLRESQAMQDRMLADSAGTDGGDFMTELEELCRDDGDAPMSTIS

SEQ ID NO: 69040 - protein, 599 aa, Zea Mays
MLTRRRSNHPGCSFPLPFLVCGLLLAAAVAFSPAAAAEAADGGAGHEGRAGKPEVEAEAEARGDGVAVAEAGGEVVAQGNATEAKEGSLADMIDRALEKEFPESEGEQGGGETDPGSFNNTVAEKQGVLETVARRVTKKNETKDNKSFPFKEVFLDRTEQEDVPTLIDRKDNVFIISNPKSKYPVLQLDLRLISDLVVVIVSATCGGIAFACLGQPVITGYLLAGSIIGPGGFSFVNEMVQVETVAQFGVIFLLFALGLEFSTAKLRVVRAVAVLGGLLQIMLFMFLCGILATLCGGKTKEGVFVGVLLSMSSTAVVLKFLMERNSINALHGQVTVGILILQDCAVGLLFALLPILSGTSGLLHGVASMMKSLVVLITFLTILSILSRTGVPWFLKLMISLSSQTNELYQLAAVAFCLLFAWCSDKLGLSLELGSFAAGVMISTTDLAQHTLEQIEPIRNFFAALFLASIGMLINVHFLWNHVDILLAAVILVITVKTFIVAIVVKGFGYSNKTSLLVGMSLAQIGEFAFVLLSRASSIHLIEGKLYLLLLGTTALSLVTTPLLFKMIPAMVHLGVLLRWFSVDTNQVEVHDHTTGPEK

SEQ ID NO: 69041 - protein, 652 aa, Zea Mays
MFPAPMGVNVNQSSTPPLVCVTPVGQFPIGFGAGNLPAFGSFTTFSATTNGVSYTGTSGNGAIDATPISAYKTRSSISLDDDDDEPYSGNQGLASERKARRGRPPGSGRDGSNGKLKRPKPTYKNFVAGKELVFLSSTSDPREFVESVHMTFEALRRRHLQMDETQDASRRADLKAGAIMMASNIRANSGKRVGTVPGVEIGDIFYFRMELCVIGLHAPSMGGIDYMTTKFGKDEDSVAICIVSAGGYENEDDDTDVLVYSGQGGNNRNTEERHDQKLERGNLALERSLHRKNEIRVVRGFKDPFCLTGKIYIYDGLYKIHESWKERTKYGVNCFKYKLLREPGQRDGAALWKMTQRWIDNPATRGRVLLADLSSKAEILPVCLVNEVDHEKGPVHFTYTNQVKYLRPLSSMKKLQGCGCQSVCLPGDASCACGQHNGGDLPFSSSGLLSCRKPIVYECGESCNCSTNCRNRVTQKGSRLHFEVFRTTNRGWGLRCWEPIRAGSFICEYAGEVIDELKFNLNDSEDDYIFQTVCPGEKTLKWNYGPELIGEVSTYVSPDEFEPLPVKISAKNMGNVSRFMNHSCSPNVFWQPVQYDHGDDGHPHIMFFALKHIPPMTELTYDYGVAGAESSGSGSRRTKNCVCGSQNCRGLF

SEQ ID NO: 69042 - protein, 609 aa, Zea Mays
MARLPLAACAVAAAFYLCLHLASSSSSAPRLAPAPSDGGRRAGRTAYHFQPAKNWQNGPMYYNGMYHLFYQYNPHGALWGVGNLSWGHSVSGDLVNWAALDTALDPTSPFDANGCWSGSATILPGGTPAILYTGIDANGEQVQNVAFPRDPADPLLRRWDKPGYNPVIPLPADVPGDKFRDPSTAWLGRDGLWRVAVSAEVRGVASTLVYRSADFLRWERAPAAAPLHASRAAGMVECPDLFPVKEEGDDGDGQGLDASASGAGLRHVLKLSVMDTLQDYYMVGRYDDAADAFVPAEPERGDDVRGWRRLDYGHVYASKTFFDARGSRRVLWAWANESDSQADDVAKYRCPNGPARPARTFPRKLWLDEDGKQLRQWPVEEIETLRRKRVVLRRGTALATGGMNEIVGVAGSQADVEVAFKVSSLAGAEALDPNWLLDPQKLCGEKGASVPGGVGPFGLIVMASSDLREHTAVFFRAFRYHGRYKLLMCTDLTRSSTRAGVYKPPYGGFVDVDVEEHETINLRTLIDHSVVESFGADGRMCITARVYPEHAETSNNHMFVFNNGTGTVEVSKLEAWELASASVNVDDDGGLMAGGSFANMCRAEEYNSS

SEQ ID NO: 69043 - protein, 62 aa, Zea Mays
MRRKPISTRLGRVLSRSSFTRAASIVSCVVSVLCRACPRVICTLSCCFTRHKFISLRIYPFN

SEQ ID NO: 69044 - protein, 288 aa, Zea Mays
MEDTHVCIPDLAKNFGFPSLDNEVVSFYGVFDGHGGKDAAHFVCDNLPRMIVEDSDFPLQLEKVVRRSFMQIDCQFAETCSLHRASSSGTTALTAMVFGRSLLVANAGDCRAVLSRCGTAVEMSMDHRPCSLSEKLRVESLGGYVDDGYLNGLLGVTRALGDWHLEGMKGAGETGGPLSADPELKMTTLTKDDEFLIIGSDGIWDVFSNQNSVDFARKRLQEHNDVKLCCREIVEEAIRRGATDNLTAVLVSFHLEAPPRIRVDRPGRVERSISAEGLNSLRILLGRQ

SEQ ID NO: 69045 - protein, 3508 aa, Zea Mays
MKLKRRRAVEVPPSIKSFINSVTTVPLEDVELPLKDFAWEFDKGDFHHWLDLFNHFDSFFESYIKSRKDLHLEDNFLDVDPPFPREALLQILRVSKLILENCTNRHFSSFFEQHLSALLASTDADIVEASLQTLMAFVDKSVGKSSIRSASLASKLFALSQGWGGKEGGLGLVACSLPSVSDPVSTEVGSTLHFEFYRAADKSEKSQCLEKENKLEVIHLSNVNSCKEADLEILDRLVKDYSVPQALRFLLLTRLRFARAFDSLTCRHQYICIRLYAFIVLVQAGHDLEVVSTFLNNEPEFIDELLSLLSYEDEIPEKIRILGVLSLVALCQDRPHQPTVLSSVTSGGHRGILPILMQNTVDSIINGSMKWSIIFAEALLSLVSMLVSSTPGSLALQEAGFIPTILPLLKDTNTQHLHLVSKAVHVIESFLDYHNPSSAVFRDLGGLDDTIARLKLEVSQVEVDSKLIDHSTNEGNEVESYPPVQDIQPSCSESLILYHRKNLIKVLLRTISLATYVPGSSARVDGSEENVLPPCLCAIFKRGKDFGGGVFSLAANVMSDLIHKDPTCYTVLDSAGLPQAFLDAIMCGGLYNSDAVSCIPQCLDALCLNNNGLQLVKDRNALRCFVKIFTSRSYMKALSGDTAGALSSGLDELMRHAPSLRSSGVSMFIEILNTIFKVWCGVDSIPYKESDNYSAVIPMDTDVVVATSQSEGVPPEVGCSGETVDAPLDAVTSSSIELFLPECICNVARLLETVLQNADICRLFIEKKGIEAVLQLFKLPSIPVSVSIGQSISVAFKNFSPQHSVSLARAVCSFFRDHLKITNELLGSISGTMLVGSEPAKQSALLKPLSTLEGLLSIANFLLKGTTIMVSELAFADAEILKELGKVYIEVTWQISLLSDSKVDTQDADQDDLAEEASISERDSDDDTNTAPLSRYMNPVSARASISPWSMEQDFVSTVRSVSHMHHHGRHSLSRISGRLNGVLNATSTDLDGPCFPAETSRRHDALKRIPDDVVSELLKKFCCTMRSFLSTLVKGLPAHRRPDSNLNPNSRSLVTALAQFFLSALGFSGHSTAGFEMSLSVKCRYLGKVVEDMAVLTFDSRRRLCNSALVNSFYVNGTFKDVLTTFEATSQLLWTLPFSVLAAATDQGSSINEKVSHNSWLLDTLQSYCKFLEYYVNSTFLLSPSSSHNRLLVQPIVTELSINLFPVPSDPESFARMLQSQVLDAVLPVWNHTMFPVCNPAFVTSLVSIMNNICSVVGDMKQSRSSVGVANQRVTGPPLDESAIATIVEMGFSRARAEESLRSVRTNSVEMATDWLFNHPEDSVQEDVQLAQALALSLGSSIETPKEDGSNKNDTVIAEEKGVFVLPLDDILTVSTKLFQSSDSTLAFPLTDLLATLCNRNKSEYCKRVVLYLFEQLRHFSSDATDMGALYSVAHVLALLLSEDSGIRETSAENGVISQVLNILGSLKSRTDQTDHTWNSISALLLILYNMLQFNPKLSMETMDGISKSISDASSADSEENPLPTAEHRTEIIDSADDASANVFKKILGKSTGYLNDQESQKALVFCCEFIKLCVPATVMHAVLQLSARLTKTHALAALFFESGGLASLLNLPGTCIFPGFETLASAIVRHLIEDPQTLQSAMELEIRQSLSNHGSRTPSSFLTNMAPLISRDPVIFMKAATSVCQLDYSGGRLNVVLLKDKEKDREKQNVPVTESGVPCNEPVRVTAEVKTVDTPNRCSRNHKKVPASLPQVIDQLLEIIMSYPSASKEHGFDGYSLLTPMDVDEPNTKGKSKVGDGQELDGDAFSERSALLSKFAFVLKLMSEILLMYVHAVGIILRRDTEISVSRSCAQGAGHSGLLHHIFYLLLPLPSVKIADTSDDWIGNLSERASWFLVALCCRSAEGRRRVVSEIVKALNQFIGSASNTSRGSLIPDRKVLAFSELVNSILSRNSQSNLPVLGCSPDIAKPMVDGGMVQSLSVLLKVIDLDHPDAVRVVNLILKALDSLTRTAYTTDQVLNSDRFTKNRLPGSHEQTHEADDIVIPEQTTYDSHHHTNDIESASQQAQELSHVGGNNNENLDQPAEQEMGVDLADNSTSNGNPPTRAVQFMREEPIEGNVMAPSTDIGLAFSMQHQVDGMGVEDEDLGEESEDEEDEEIAAEGAGLMSIADTDIEDQENNAIGDDYNDDLMDEEDDDFLENHVIEVRWRESLTRMDYDHHLRFSRGRADSSGFIDISSESFHGVGTVDSFNLHRSFGLERRRQIGSRSLLDRPRTDVNAFLHPLLVRPAQSREGTNSAWPSGGTSSRDFHMLSFDIPSYMLDAGFSPETAPPVFGERVVSTAPPPLIDFSLGMDSLRIRRGPGDNLWTDDGQPQAGNHAAAIAQAVEDHFVSQLTVANNSNSAPQVRPEQTGNGANAHSELPDTGNAEPVTTDPLSQPVGRHQLVCTVNQGPVPANDVLCPTDVHVNQHLVDSIYDSRVVEPVQQTAAGDPNTIPQSDEMMCIAGTQLGGHPERDSLSGNGSYGNIMQNEIEAPQQVHLGNDPREPPSDLESSCHALVTSASAAPELSDAHVDSSAVNADVDMNIVDIAENEVGNSAPASDGNDLSSRRYEDALQEPQTVQTNAINEASSANEIDPTFLEALPEDLRAEVLASQQNRSAPAASYTPPAAEEIDPEFLAALPPDIQAEVLAQQRAQRIAHSQPAGQPVDMDNASIIATFPPDLREEVLLTSSEAVLSALPSALLAEAQMLRDRELSRYRARGSLFGGSYRLGGRRLPTDNQTVIDRAVGVTVGRRVISTTCSSKGKDVEGTPLLDSEALRALIRLLQLAPPLSRGLLQRLMSNLCAHSVTRVTLVGHLLNMIKPEYEGLSVSDCMATYRLHGCHWNIVYAQSCSANGVPPLVTRRLLEILTYLASASPSVVDLLIYFNPSASPNCLTLQHNKETSQESSMQNMMPPYSKAYTPIILLLKLLNKPLFLRSRVYLEKITNNSDIEFVDGTPYQTQVEPSTLEQGHIPDNNQSRDVEVPPSCAKLDVNVHAILTQLPDAELHNLCNILALEGLPDKVYSLAAEVVKKLASVAASHRKFFSIELAGVAQSLSSSAVEELVTLKNTQMLGLSTCSMAGAAILRILQVLSTLTSCVMDSRHEQDLGQEEQSFLWDLNAGLQPLWQELSDCISATEAKLVHNSSFASHAPSVDALAVSASSSVSSPLPPGTQRLLPFIESFFVLCEKLQTNQPVAQSDYTVIAPEVKESAGSSSSPSLKTGGTCNVTFIRIAEKHRRLLNVFIRQNPSILEKSLSMMLKVPRLIDFDNKRAYFRSRIRQQHDQHLPAPLHISVRRAYVLDDSYNQLRLRRTQDLKGRLTVQFQGEEGIDAGGLTREWYQLLSRVIFDKGTLLFTTVGNNATFQPNPNSDFQTEHLSYFKFVGRVVAKALFDGQLLDVHFTRSFYKHILGAKVTYHDIEAIDPDYYRNLKWMLENDVSDLPYLTFSMDPDEEKHILYEKTEVLKSHHGF

SEQ ID NO: 69046 - protein, 53 aa, Zea Mays
MNVCELTLAVSHPPTGQEQIPQDEAHGGCCDEYVRGLGRRLPVNFGLLDRVFI

SEQ ID NO: 69047 - protein, 562 aa, Zea Mays
MCLAIVLFAICIKMILQIDLTIVLLNCLIMVEQVKEFERNGVKLSQSKRKEMEKLKSHIDALNLKYLQNLNDFTKFLLLGEDELAGMPFEFLKDLEKADGKFKVPLTSYHVTPVLEHCKVGSTRKQIAVAYGQKGGKDNVAILENLVQLRHKFAKLLGYTNYADFAIEPRMPKTSRKILEFLEEMSEQLSDVANRELNILKDLKIKEEGNAQFGMEDLLYYIKRAEEFKVDLDVGEIKQYFPVGLVISGMLKIFQDLFALRFDEIKDVDVWHDTVRVFSVWDASSSDLLGYFFLDIFSREGKYAHTCVVTLQNGCLCSNGTRKVPAAVILSQCPKEFDGNSALLRFPEVVRLFHEFSHVVHHVSNRATFSRFSGLRLEGDFAEIPSLLLENWCYESISLKMMSGFHQDITKSISSEACQSLKRRRDLFAGLKMKQEILLCLVDQIIHSSENVDIDDLIKDLHPKVMLGIPLLEGTSPASSFPRIAFGYDAVCYSYIWSEVFAADLFVSKFKDDLLNQHAGLRFRNKVLAPGGSKDPLEIITDYLGREPSLQPFIQSRTRNSL

SEQ ID NO: 69048 - protein, 1006 aa, Zea Mays
MVAHPLQPHLVATGTNIGIILSEFDPRALPAIAPLPTPTGNKEHSAVYIVERELKLLNFQLSNTANPSLGNAGVASDAGRSMNNSIEQLIVKQTKKHISTPAPHDSYSVLSVSSSGKYVAIVWPDIPSFAVYKANDWSVVDSGTGKLFAWDTCRDRYALVESALAPRMPLVVKGGSSKKAKEAAAAAAQAAAAAASAASAATVQVRILLDDGTAHVLQRSIDGRNEPVIGLHGGALLGVTYRTSRRISPLTATAISTVQSMPLSGFGGSGSSFASDDPFSSKEGPPQNFQLYSWETYQPVSGLLAQPEWTVWDQTVEYCAFAYQQYIVISSLRPQFRYLGDVSIPFATGAVWHRRQLFVSTPTTIECVFVDAGVAAIDIETKRIKQEMKAREAQSRAAEEHGDLALITVEAPQVTVSEKVSLRPPMLQVVRLASFQYAPSIPPFIVPKQSKFDGDDSVFQKELDDRRYAEVAVAGGGVSVAVTRFPPEQKRPIGPLVVVGVRDGVLWLVDRYMCAHALSLSHPGIRCRCLAAYGDPVSAVKWATRLGREHHDDLAQFMLGMGYATEALHLPGISKRLEFDLAMQSNDLKRALACLLTMSNSRDVGQETAAADATDVTQILSLAVAKQAKQESLTDAVQGIVKFVKEFFDLIDAADATGQSDIAREVLKRLAAAASVKGALHGQMLRGLALRLGNHGELTRLSGLVSNLITAGHGREAAFAAAVLGDNALMEKAWQDTGMLAEAVLHAQAHGRPSLRNLVITWNKMLQKELDHTPTVKTDAAAAFLASLEDPKLTSLGETEKKPPIEILPPGMPPLSAPPIVIKKAGAKPGLPNAAKASNGPIGAPMAQGAPMAHGTPGPQGVPMNQVTPSQGSHDEARPSDATVADAAAAVAEGTAAPPAAEGTSAPPAAEGTATPSSEEAKAAPGNEEGTSNPINEEATAAAVSVAAGSPDSAAAPAADTSSDAPAVNPTEDTVSAPSTEAPPELTDKPSSAEASLPPPPSVSGV

SEQ ID NO: 69049 - protein, 412 aa, Zea Mays
MESASDVQMQHRAEDSETTIEIKIKTLDSQTYNLRVNKCVPVPLLKEKIATVTGILSEQQRLICRGRVLKDDELLSAYHVEDGHTLHLVVRHPGQSATFGNAATEANTSNSGRRHGPTVARSVVLEAVNVDPGSSELPAFVAQILQSVLGTINAQSTGTPTSSDTGSLDPSQSSIPNTIRVELDQQQAPLLFQSEPAHESSQPNVIPDALTTMSQYINFMRDSFRREGFSLNGQTEGNVENRTAEPESASVLGLHNASLLAENMHSTRQIIVEQAGALLSQLSTQLGDLENVTDSAIRRDIQSSAVRTGSLFQNLGSLLLELGRTTMLLRINPSSSEAVVNSGPALYISPSGPNPLMVQEGLSKWVLCFLVWVHKDLFYIREMLISMSAQVGPCLEPVLTQVIQLVRKRIKM

SEQ ID NO: 69050 - protein, 377 aa, Zea Mays
MANRTDPLAKSIHGTNPQNLVEKIVRSKIYQSTYWKEQCFGLTAETLVDKAMELDHTGGTYGGNRKPTPFLCLALKMLQIQPDKDIVVEFIKNEDYKYVRVLGAFYLRLTGTIADVYQYLEPLYNDYRKIRHKLSDGQFTLTHVDEFIDELLTKDYSCDTAMPRIQKRWVLEASGTLEPRRSALEDDFEEEEEDKEEQPMEIDEPNGRENDNHRGRSLARERDRDWDHDRKHERHNRDYGRGRERHRDRDRERDRNRDRDRDRHRLRDDDYNRNRDRDRERDGRERERRDRDRGRHRSRSRSRDRRDRDREDGEYRRRRGRGSVSPRGRGEDGGPREEPKRKKEKKEKGEGNAPDPNDPEIIEMNKLRASLGLKPLK

SEQ ID NO: 69051 - protein, 580 aa, Zea Mays
MGLQEKHSRSRKEGAALAETAPAQRKSYSFRLFSCQGDISRNVISHPKAAKKEPVVSVEKELDSSELAPAVVPLLERAVSVVSSSDSLSQCEDAVHEVARACSAWDPSLVNLLSCASFIQGLLEVTLTSKDDAVLESAMSIMGKLVLGNEVIRQLVLNADPQLEVFLRLLRSSELFLKAAVVLYMMKPKAKQMLSLDWVPLVLHVLECGDEVQSLFSVRCAPKIAAFYFLDQLLMGFDVDRNVENAKQMIALGGLDLLIGRLGAGDARESRHCIALLTTCVQADGSCRHYLADSLKKEPLVQLLAGNQRKASAASLNLMSELVCLNRTSKIVEFVKELKNSGCLNTMHVLLVYLQQAPLVQHPLAATMLLQLDLLGDPSQYSVYREEAIEAIVAALEHSSQSRKVQEQCARALLILAGRFSSSGEPVAEAWLLKRAGLDDSLSESFRRSEVFKDKSVRAEEEKLVEERQKNLALMLLKSGGRRFLTALSSCISDGTPSLSRSCLVSVAWMSSSLSPLRGCNDFQPLACSVLASKLLDSLSYDRVLEERVLASLSLLNVVRHPGTYVCKTGDSQVTVKRRR

SEQ ID NO: 69052 - protein, 129 aa, Zea Mays
MLCASSGSVCLYFNCLRAEISEAFSPALSSDHSAQQACGDSFVRGAAVRAIPLVCGDQAGRLSTSPWSGQFDRSRGQIHRRLSNLCLLRAALRKHQDLELPTEGVKIQDEVVVEEEFAPVHVHQVDGGI

SEQ ID NO: 69053 - protein, 339 aa, Zea Mays
MLLEMLLNNCGEPVHRQVVDNSLLPILVKIVKKKTDLPVREKIFLLLDATQTSLGGAKAKFPQYYEAYYELVSAGVQFSNRPNVVVTRAEVPVPETRTEPNNVSLSARLHEAQQEVHTQPALDTSIVQKACSVMEVLRDVLNSMDPRHPEGATDEFVLDLVEQCTFQKQRMMHLVMTSRDEMVVSQAIELNEELHKVLVRHDVLLSVHPTTTVASNINEEENAESLYRRLRKGKALSQDYTDDSVPSFRSMPEDKLRRPLTIQSPHPDKRLGALNIHLPDGEEPRHDPAPLIPPPPAKHAERERFFQEKSIDEHRRRSGQPAGSPEGPVAAQPGQQQLV

SEQ ID NO: 69054 - protein, 457 aa, Zea Mays
MNLTRLDSKLQAASDVSQLRRSAMLHAASICTNLNALLDGAADPAPEIWGKTTEEEQIHSGIGSWPGINMPVKPANSSLKLYGGAAFERVMHEFRCATYSLECPQVSREKVANILLAHAGRRGSSRLTEAAVAIARAAARSWLAPLIDTACDRLAFVLQNLFDLAMERNRNNDSQYHQNFEDMDSYVGFLAALRCSYYKFVKELSKQCKQIVRHHLDSVTSPYSHICYDDDFFSGVGSVANSTCRFNHFTGVTSFDLADSGSALEEAQENLPPKDQHHMTPPINKGNDSKEVLRESQLTVPETPSPDLPSDIHGGKKKDNGIPNDGGPRKRHARMAAYTSRNHHNSMIGADDMASKSGSSYSTICAISAQYFAKMREVLIERNAPSALNSGFLTPCRERLFLALGFELFAVSDNKFMGMFVLPGAVDGIQNERHSLLKRQKILLSCLNEFKNISRAL

SEQ ID NO: 69055 - protein, 276 aa, Zea Mays
MTTTTKNHKQQQLLPMAPLWDEFFRGHRGLYNVYVHSDPAFNGSDPPETSAFYRRRIPSKEVKWGEISMVEAERRLLAHALLDDHCNARFVLLSESHVPLFDLPTVHSYLVNSTRLYLESYDQPGATGRGRYNRRMSPVVAAGQWRKGSQWFDLDRALATDVVADRVYFPLFRRFCRRRHCYADEHYLPTLLNIVRRPSAGANRSLTWVDWSHGGCHPARFTRMEVTVDFLRWLREGSTCTYNGRTTTVCFLFARKFLPNSLTRFLRFAPKVMGFG

SEQ ID NO: 69056 - protein, 843 aa, Zea Mays
MNADVSPSVPMINLMNDLLDLSLHNYETVRSYAGRSLTKLLKRWPSLISNCVLTLTGNLRDPKAPEHVVLGSCSILISQTVLRHLTTDSVSLSSFIMGILESSHHESLKCQKAITELFVTYNIRFSGISRSFFKTPENQADKPGFLSLISQINALGFETNGLHWRYNLMANRVLLLLILASRSESGIYSQMLAKIAGHFLRNLKSQLPHSRMLAISALNTLLQGSPHKTSAQNSKQPIDHPEDCNISSTEEILNEIIREEGFMNETLNSLSHVHIISDNDGSSKASYGASSFQSGSDKAITYFYFDFSASWPRTPSWISLLRGHTFYSSFARIFKRLIQQCGMPVISSLQSTLEEFLISKERPRQCVAAEAMAGMLHSDIIGNLECENNWLMAQLHKIMLAPSVESAPEWAACIRYAVTGKERAGTRAPVLRQKVLECLCTPLPHSMATSVLAKRYSFLSVALIEISPPKMSPAEKQYHVKILDELLDSMNHSSAQVREAIGIAMCVTTSNMRLSGLFGTGCSPQGLHGDVSMIEQTGNKYWSERLTDGANELAVSIQNSTQSKQLESTSDSAEDSMDDREQADAKRMETIFHFMIASLKSGRSSVLLDTIIRLVYPILSLQETSNKDLSLLAKSAFELLKWRILHRPFLETAITSILPLVSDPNWRTRSALLSYLRTFTYRHTFILSGSEKSQIWQTIEKLLVDNQVEVREHAAGVLASLMKGIDEDLSKDFRERSYAQAQHIFVARRRNLKFSVGTIHGAVLALTASVLSVPYDMPSWLPSNVSLLARFIREPPPIRSTVTKAVAEFKRTHADTWSIQKDAFTEDELEVLRDTSSSSSYFA

SEQ ID NO: 69057 - protein, 159 aa, Zea Mays
MKTGIVESDLVLTVSPHYVKELTYGPDKGVELDGVLRTKPLEIGIVNGMDVYEWDPSTDKYTSVKYDATTVTEAKALNKERLQAEVGLPVDSSIPVIVFVGRLEEQKGSDILIAAIPEFVGENVQIIVLIPICSSPGGLVDTVEEGCHRIPHGFFQCRV

SEQ ID NO: 69058 - protein, 189 aa, Zea Mays
MASSPWLRTAGAAPVPPPEAAAAAATAAATPAPTSEQHREEGNAAAATVPKQEEAKLHLPRDNDSEAVTQEHGQKINRYQAILAARLKAKFFSKKAFDRGNIFESETIVGGETIRSSRWPCTRSFANPEFFSRDKNSHEKGNSPSSAADFSAKNNSPPLAGEASPKNNASALVTENNLTTGNRQQSKKN

SEQ ID NO: 69059 - protein, 894 aa, Zea Mays
MAVRGSSAFKLRFYPNLEVQNIAQEWVKESRRLFYLRTANNVTNNIYKGNTPLWTGMVQNELSEDCRGLNYTYLNNLRERVSSKSIVNRHGNNRELIGHSTINQHVKSVPAPVRVVNDSVKCFSMPRASKVEIPWPAYSPAEDPLLDKSNTEVANINAKEETPVGHGEVICFSIYSANSDVQAADFGNGKTCIWVDVLDGGRGVLMEFAPFFEDSSIKKVWHNYSFDSHVIENYGIKIAGFHADTMHLARLWDSSRKIDGGYSLEGLTNDRRVMDTVPEDLPKPGKTSMKTIFGRKNIRKDGSEGKVVSVEPVKKLQREDRELWICYSSLDSMSTLRLYDSLKSKLTTRRWILDGCPRGTMYDFYEQYWRPFGALLVKMETEGMLVDRGYLSEIEKAAIAERKLAADKFRKWASKYCPDAKYMNVNSDIQIRQLLFGGIENRHKSGETWPHSKTFKVLNEESVATEGKKTSKYRTIKLCSIVEDLKIDMFTPSGWPTVSGDALRSLAGKIPTEYIYTIDDIQDDDEYTSGSENPDGNSSYGTAYEAFGGGKNGKEACHAIAALCEICSIDSLISNFILPLQGDHISCAEGRIHCSLNINTETGRLSARTPNLQNQPALEKDRYRIRQAFVAAPGNSLIVADYGQLELRILAHLTNCKSMLHAFKAGGDFHSRTAMNMYQHIRDAVQEKKVLLEWHPQPGQEKPPVPLLKDAFGAERRKAKMLNFSIAYGKTAVGLSRDWKVSVKEARDTLKLWYRDRKEVLAWQKSQKKLASEKGEVYTLLGRSRHFPYLTQYGPGQRGHIERAAINAPVQGSAADVAMCAMLEIERNVRLKELGWRLLLQVHDEVILEGPSESAEVAKAIVVECMSKPFYGTNILNVDLAVDAKCAKSWYAAK

SEQ ID NO: 69060 - protein, 311 aa, Zea Mays
MSSYLFRSWEPNSSQSISGSEISDSSYVREVEEARHSFQHYEDCIVENLEPRCDSFGRASYMYDNGHTSPDLLSMHSPASSRLERAQSVESLESSVKGATSDEEYEVNVKHEVIVDDEKVVGWAKAHNNEPLQIVCGYHALHLPPRGGELVFRPLEHLQPVKYSRPGLPLLGFGEEILDNALTRAEKNKINLHLVAAEEALALSIWTMATVCRSLSLESVLGLFTGVLLEKQIVVICPNLGVLSAILLSIIPMIRPFQWQSLLLPILPRKLIDFLDAPVPFIAGVQHKPPDIKMKGSSLVRVNVQKDQTIV

SEQ ID NO: 69061 - protein, 426 aa, Zea Mays
MGYMDPECMVTGRANAESDVYSFGVVLLEIACGRRPLVPRHGVGMRIPRLRLQIVEAASHNSKFLFLASCAPPAGIVLVEFPKSQPPQYTPPDPCSITATKILRLHLQSTRLPLVSRLLFTSFASRRSLMAAAAAAAAAVSSPIAPRAVAAAASRRGFVTFGGGAARSSPTLRSGRGFSGVQTHVAAVEQAVVKDATKLEAPVVVVTGASRGIGKATALALGKAGCKVLVNYARSSKEAEEVSKEIEASGGEAITFGGDVSKEADVESMMKAALDKWGTIDVLVNNAGITRDTLLMRMKKSQWQDVIDLNLTGVCLCTQAATKVMMKKKKGKIINIASVVGLTGNVGQANYSAAKAGVNAIAPGFIASDMTAELGEELEKKILSTIPLGRYGQPEEVAGLVEFLALSPAASYMTGQVLTIDGGMVM

SEQ ID NO: 69062 - protein, 875 aa, Zea Mays
MIRDQQEKAQLERNMRERDAANTRKLMERQLSKEEQEELTRKSQAMDNNDTSDLRKFSRQAYLQKRRDKKIEEIRDEILDHQYIFQDLKLTEAEEKELRYKMKIYDLVKEHVETPDDVGAYKMPEAYDMGENVNQEKRFAVAMQRYKDPKANDKMNPFAEQEAWEEHQIGKSKLQFGSKDKKPSSDEYQYVFEDTIDFVKSSVIEGTQPEDDSDKEDVEAKDILKRELQDERKTLPIFKFRDELLKAVEEYQVIVIVGETGSGKTTQIPQFLHESGYTAKGKVACTQPRRVAAMSVAARVSQEMGVKLGHEVGYSIRFEDCTSDKTIIKYMTDGMLLREFLGEPDLASYSVVMVDEAHERTLSTDILFGLVKDISRFRPDLKLLISSATLDAEKFSDYFDSAPIFKIPGRRYPVEIHYTKAPEADYIDAAIVTVLQIHVTQSPGDILVFLTGQEEIETVDEILKHRTRGLGTKISELIICPIYANLPTELQAKIFEPTPEGARKVVLATNIAETSLTIDGIKYVIDPGFCKIKSYNPRTGMESLLINPISKASANQRAGRSGRTGPGKCFRLYTSYNYMHDLEDNTVPEIQRTNLANVVLTLKSLGIHDLVNFDFMDPPPSEALLRALEQLFALSALNSRGELTKTGRRMAEFPLDPMLSKMIVASEKYKCSDEIISIASMLSIGNSIFYRPKDKQVHADNARLNFHTGNVGDHIALLNVYNSWKETDYSTQWCYENYIQVRSMKRARDIRDQLDGLMERVEIEICSNTSDLDAIKKAITSGFFHHSARLQRDGTYKTVKNPQTVHIHPSSGLAEVRPRWVVYHELVLTTKEFMRQVTELKPEWLVEIAPHYYQLKDVEDSGTKKLPKGQGRAAL

SEQ ID NO: 69063 - protein, 166 aa, Zea Mays
MTRHVSSRCFKCYSMLNNRQKVEWNNRGFSTLHALVAAAVSFYLVMISDLFNEDAHNSIIIDRKSWLSDCMFGVSIGYFLTDLTMIMLYFPSLGGNEYLLHHGLSMYAIGLALLSGKAHMYILMVLFTEITTPFVNLRWYLDVAGQKTCNLYLYNGVALFVGWLLP

SEQ ID NO: 69064 - protein, 79 aa, Zea Mays
MEAATGLPTASRGSAAVFGRRRAISRLSIHCAPSKILTGCRGRDDPEIRVFIARRNHPSLTHQWRSGMHGAHGRRTHGD

SEQ ID NO: 69065 - protein, 775 aa, Zea Mays
MKPKSLPFIAFEHKRDAYGFAVRPQHLQRYKEYAGIYKEEEEERSDRWKNFLERQPESSGQDAGDNATGDGSESLHEKTVAGPQKIQIWTPIRSSLSNIEQIMSLRIGKKQSSAGKQQAKDGTHHVKGEESKLSEDSDDEFYDVDKVDLSQEAQSSDTRNADVGSRNQEENYISREELECLVHGGLPMVLRGELWQAFVGTGARRIEGYYDSLAAEGELDNKSSPTSEGVQEKWIGQIDKDLPRTFPGHPALDEDGRNALRRLLIAYAKHNPSVGYCQAMNFFAGLLLLLMPEENAFWTLVGIMEDYFDGYFSEEMIESQVDQLVLEELVREKFPKLVLRVWDVLLFDGNRVMLFRTALALLEFYGPALVTTKDAGDAVTLLQSLAGSTFDSSQLVLTARMGYQSVNETILQELSNKHRPSVMSAMEERAKGLGVWTDTNGLASKLYNFKRDPEPLVSLSNSADQLSDVGDGDANQESDPVNMDDEYVGVTVKSEIDSLPDPKDQVAWLKLELCQLLEERRSAVLRADELETALMEMVKQDNRRQLSAKVEQFEQEISEFREALSDKQEQEQAMFQVLMRVEQELKIAEEARISAEQDAAAQRYAANVLQEKYEEAMASLAQMENRAVMAETMLEATLQYQSSQQKALSPCPSPRPSMLDASPSQASQNSSQVFQPRRKNLLGPFSLSWRDKNKEKPNNVEDSANTKFTNSDEMVDEKQMETLDLDNEQRAESTKEDGKMRAETPQKDDDLVRVQLTTDHLNGHHEQMQEIKLDW

SEQ ID NO: 69066 - protein, 602 aa, Zea Mays
MSVSEAAYPPPPPSSWAQQIRAAAAEGHFCDAVSLFLRMRASAAPRSSVPASLPAALKSCAALGLSALGASLHALAIRSGAFADRFTANALLNLYCKVPCSYLDSTGVAIVDVPGSSTAFESVRKVFDEMIERDVVSWNTLVLGCAEEGRHHEALGFVRKMCREGFRPDSFTLSTVLPIFAECADVKRGLEVHGFAFRNGFDSDVFVGSSLIDMYANCTRTDYSVKVFDNLPVRDHILWNSLLAGCAQNGSVEEALGIFRRMLQAGVRPVPVTFSSLIPVCGNLASLRFGKQLHAYVICGGFEDNVFISSSLIDMYCKCGEISIAHCIFDKMSSPDVVSWTAMIMGYALHGPAREALVLFERMELGNAKPNHITFLAVLTACSHAGLVDKGWKYFKSMSNHYGIVPTLEHFAALADTLGRAGELDEAYNFISKMQIKPTASVWSTLLRACRVHKNTMLAEEVAKKIMELEPRSIGSHVVLSNMYSASGRWNEAAHLRESMRKKEQMAREGHVPNTEDVFQDIEEEHKSYVLCGHSEKLAIVFGIISTPAGTKIRVMKNLRVCIDCHTVTKFISKLADREIVVRDANRFHHFKDGNCSCGDFW

SEQ ID NO: 69067 - protein, 73 aa, Zea Mays
MAGICGLYERKIRDINPMIPNITYDISDLYNFIDGLADISALVYDHSIQAFLPYDRQWIKQKLFQHLKKLAQR

SEQ ID NO: 69068 - protein, 324 aa, Zea Mays
MAAAQGGTVVCSSEKVEFLKLQNGSDIRGVAVAGVEGEPVNLTEDVTKAIAAAFAAWLLNKKPDGLRRLRISVGHDSRISAHKLQNAVTHGITTAGHDILQFGLASTPAMFNSTLTEDERSHLPVDGAIMITASHLPYNRNGLKFFTSDGGLNKADIKDILERASKIYEESAHNNLKEQGEASKGVVTNVDYMSIYASDLVQAVRKSAGDKEKPLEELHIVVDAGNGAGGFFVDKVLKPLGAVTTGSQFLEPDGLFPNHIPNPEDKTAMKFITQAVLDNKADLGIIFDTDVDRSAAVDSRGRELNRNRLIALMAAIVLEEELQL

SEQ ID NO: 69069 - protein, 153 aa, Zea Mays
MLYKSSSYSFPMKLDAHQVEPSQKEDNDDYLTHLLFTEDNDKDELVNVPGSVTDVMRGAPGIYIFECRGPSPMDSIRRKHRVAAGVEQESSLVIEGRSDDHRDHRGLCVAFWSTGSIVKPEISRRRRAQPHSHDFSRAEGVPHCKTLARSRDI

SEQ ID NO: 69070 - protein, 291 aa, Zea Mays
MRRQGQYGEADINSMVAAQLHHYQAQQRVQKHPENSYTGRDPAQASAEHQYTPPKARQSQWDRGGPNAPSQVPSYAYNEAQGAGGAQSFYDGQRSDTKVGLEKQPSKESREQPRTERTETRYENYNLPRTFEGLEQSFHEDIILLSKELQEAEDAENSRHMERLKDINTQYQEKLLALRARQANYRDEFLRKESLARQQQYQHASMSHYASNSTAGEQHGYNPTAAGTPPVAAGGAYGEAHRGYASGQYESFSDRPDYPEFHDGGRGRGRSSEQRAQYPGGRAYNSGGRRF

SEQ ID NO: 69071 - protein, 103 aa, Zea Mays
MSCAGQAGGWLLDYALVEEEIQGSEFIYMVDDPAVSSVILGFDAPRKEDGVQDNPGAKKRQSFSSSFLSVDPQHKVKLGEFRMPSRSLQRYNHEWVGMFLVCR

SEQ ID NO: 69072 - protein, 98 aa, Zea Mays
MIDAAWCIVVACGVCSAPSKPGGLDDDSMDELCSCGNGGPPLPLLLSLRPPTAMGSGRASSGAQPPYCRRRGALLAAIVTHRPCRSELVAERGYESSE

SEQ ID NO: 69073 - protein, 109 aa, Zea Mays
MKKTSSPLLIVLFLTAAAMAAEPEKQAAPAAQETAVHIVYVDRPEDADPEEFHIRTLTPVLGSEQKARDAVLYHYKNAASGFSAKLTPQQVKDLKAFLRTWLWGCEENP

SEQ ID NO: 69074 - protein, 81 aa, Zea Mays
MAAGRRQDRRHHHGRPLSDGKVTGRDDLDADPSGEHQRTPSGGPEGERTRWSQEQRGMPTARGIDPFLKVDPPLAPLKRHE

SEQ ID NO: 69075 - protein, 225 aa, Zea Mays
MGGLCSKVSAVDKSPSDTAFGRNQVTDHDPGASLELEKQPVSGKAAAPAKRLDEQQQQHQSFSFLESVVPGVAFHARANASGETGPRTSPQLTRSLSQRDGVGKAKAGADKVSEVSSILGRASTVGLEKAVEVLDTLGSSMTSFNSSRGFVSSSAAKGNKISMLAFEMANTIVKGSNLMHSLSELSIKHLKEVVLHSELQKVFNTLYPKILMNCSRWQLPTKGKS

SEQ ID NO: 69076 - protein, 50 aa, Zea Mays
MFVQFFKSCRHYRRRCSNTCCRRGLIPQPNVRQKIAIKKTGATLDAQIDL

SEQ ID NO: 69077 - protein, 145 aa, Zea Mays
MFSSAGKVRVPKQLFVNTDPSSIPAAVRRAGLSLPLGGVMFKVYIVGDAIRVVRRFSLPNVDEGDLSNNAGVFRFPRVSCAAASADDADLDPRVAELPPRPLLEILARELRRRLGLRLFNIDMIREHGTRDRFYVIDMNYFPVHC

SEQ ID NO: 69078 - protein, 764 aa, Zea Mays
MDMERGAGSEQGSPDSEMGEGDNDSVGYGAEMEVDAGSGSAPASSASASASVSASAYAARAGAFDGVDPFEGMEFDDEEDAWTFYNVYAHRVGFSTRISVMHRSRRDGSVMSRQFVCAKEGFRTYRGKNEVSRADAADAGDDDSGRGRRTRAVTRVGCKAMIRVKKQDNGRWSVTKLETAHNHPLVPTNQAHCLRPHKPLSECGKHRPFGGHRNGGSLLAIEPPPPPLTPPVPHTSVAQVVPQYFSDGIGNATRVILDYVKRMQAEDPAFFYAMQFVEGRPVGNVFWADARARTTYKDFGDAVVLDDYCKRSKHELPLVAFTGVNHHCQPILFGCAIMAHNNEVSFVWLFETFLLAMSGCHPTSLIMEHDNVLKPAALKVFPLTRLQFCKWHIMNEAHDKLSYLLDAFPSFHDDFINCINMSETINEFEENWKALISKASSQKSEWLDLVYNCRHHWVPVYLRDTFFGDVSLKLQCSSRSSLFEGYISAKTDSQSFIQQYEKALDCCYEKEVKEEFETKYSLPDIKTSSPIEKQGAELYTRSMFLKFQQELICATAYTAEMVKEEGNASIYTVAISEGSEKSVTVQFCSSGSSATCSCRMFEYFGIVCRHILTVFGVRGVSALPSHYFVKRWTKNALDRSLGKNVDEVSREELKEEPRSSAEDGEQSLTWRYNSLCHEALRYAEEGASSLEVYIVAMQALQEAANRVNMAKRGIGQVAPLAVMPIAAQPPESFARNQEITSNKQKKRKKNSSSSRENATSNQLI

SEQ ID NO: 69079 - protein, 143 aa, Zea Mays
MNPNPKLPSPPPCPSIDRLMDPMRAGGVIDHVIEPKVVGVQCRLDRGWWGRPGDVSQIAFGLLQQRCEDEVLEVAQRDHELVTEPAQQPRALDLAPTGDPHCGLLSRITPHLELHRRLNLPGQGHVPCGGYKNVGGLYNSIAW

SEQ ID NO: 69080 - protein, 267 aa, Zea Mays
MLSSMIPAIASTVDTIISAAEMWKALEEMYSGAGNVMLMVETEDRLHNIKQGERTVAEYVQELQCLWADVDHYDPIELPHSECVVWAKKWVEIRRVLQFLRGLNPEFEGRRASMFHQSTLPSLQEAIAAISQEESRLKVMRESPPVSSHPVFSAMRTKDARECYNCGDVGHIARNCTKPFKFNRGRGRGAARGGRGRGGRSWARANATTTKEDLEIFMENEAETKSTEQHKIPGNKNQESYTRDFVNFAYTDEGEENREKTWDSYQA

SEQ ID NO: 69081 - protein, 80 aa, Zea Mays
MGTAELSLLSCLPKRPISLAHHCTVRRRRSSPEFAARCRSPWSSPECAVVAGVHRSRVLAVRSRAPLSVDPSPSHARTRG

SEQ ID NO: 69082 - protein, 76 aa, Zea Mays
MMASNIWDERAVANRADVTTNWDKFAAELKKMNDNMVELKKIKDNIVELKKMFGAFYASMIFILFLFFVMNYNCKR

SEQ ID NO: 69083 - protein, 305 aa, Zea Mays
MANDKDLLRVVLTLDYACKEVGFFYVKGHGICEMLMREVRDVSHKFFQLPHEEKMKIKMTRQSGYRGYQKLGENVTKEKRDMHEAVNCLTPIAPGKYGDLGKTLEGDNLWPEYPSNLKVVLENYISLVKDLSRKIMRGIALALGGPADAFERGIAGDPYWALRLVSYPVSSSDEKRTDDTGMMGSHTDYGLVTLVNQDDDICALEVQNRSGVWIRANPIPETFLCNIGDMLQVWSNGIYQPTVHRVINSSHQRRVSAVFFYETDFDAAVEPVELCVEKTGGVAKYDKVVYGERLVRKAFCCFGHL

SEQ ID NO: 69084 - protein, 188 aa, Zea Mays
MDPGQRISHPLPIRFHSSTNSPPPVTTSRLALSDPAHILHPVLCSAPSVHHHALLGRRAAAPPSPRPSSDRRRNRYTESRKPMALLAPSPRALCVREAAAASPHPHSLATAACSTVGGGVAGRALWLWNGGGTGRRRRERRERFRAEAYFWDVSKPVEMEEIDSMEKLDDALRWSVENNQPIIIDWYE

SEQ ID NO: 69085 - protein, 360 aa, Zea Mays
MMVIPFFQHASTSGETPLPGKMNPRIDRSGSNETSKVPRLGSIVGTASMAGFGKAVEILDTLGCLMTTLSSDGGFVSRTKTKGCKISILAFEVANTILKGASIMQSLSEDTVTYFKQVVLPSEGVQNLVSSEMSELMRIAANDKREELKIFSQEIVRFGNRCKDPQWHNLDRYFVKLESENAPQKQLKETSIAEMQKLMSLVQRTTDLYHELHALDRFEQEYFSRINGKGHTDRIEKGYFAGGNIQIVKLELKTQSSYVKSLKKRSLWSKTLEEVVEKFVDIMHYLHVEINNDFGSSDGGVMNAESTESCQRLGPAGLALHYANIIIQIYSIVIFSLFLLRQIKILSNLLSFTIINYVSS

SEQ ID NO: 69086 - protein, 445 aa, Zea Mays
MAAEGGGGQETFEARVKRLFGSRLFDAVPDSSFPTASWSVAAGDVERQRWAKPSEARDAEEEAAGEAGRGDTPCASSFYDSNGCLRSRRRRSRQEEFEGDLDDLDEDEEEDGERGRATEQDEDEGVRVNIGLDPTLDREEEEDKYDREAFGREEAADRVYMHDIMDDGINMSINSIVPDLLDDSIEGVYRFKKDPRADMRAASARLREDDGSAKDGDSHYATEAKDFLNVGIQTKKAVEEVNVKPILKRKEEQADLKPRKRVRFDANVKDRESDMFERDEDSPMVPQSMEVVTGKESTPTLSVSPGVPDYVRNPSKYTRYTLDVPESNDDSNRTALADLHDLLGRSDQNRIHSETAVEIPSSVTFIPRKKSVDAMAVDDGPRAIDSNSSVIGLVAGASDEPDQCEMDEDDSNLSSTPQMHTNSKANSRRYRYALPFLCRNECQQN

SEQ ID NO: 69087 - protein, 523 aa, Zea Mays
MLVRHVFPEFSSRVGHLRAKAAWVAGQYAHINFSDPNNFRQAMHCIVSGMHDPDLPVRVDSVFALRSFVEACKDLNEIRPILPQLLDEFFKLMNEVENEDLVFTLETIVDKFGEEMAPYALGLCQNLAAAFWRCMASSEADDEADDSGALAAVGCLRAISTILESISSLPHLFTQIEPTLLPIMRRMLTSDGQDILVPLDNYISRGTDHFLACKDPDYQQSLWKALQSIMMDENMEDSDIEPAPKLIEVVFQNCKGNVDHWVEHYLRITIERLRRAHKPYLKCLLVQVIANALYYNPALTLEILNKLGVAADIFNHWFAMLRQVKKSGARVNFKREHDKKVCCLGLTSLIALPAAKIPADALDRIFKATLELLVAYKDQVAEAKKQNEEAADDMDGFDADEEDDDEVDSDKEMGLDDEDGDEVSSLQLQKLAAEARGFQPADDDDSDDDFSDDELHSPIDEVDPFIFFVETVQGLQASDPARFQNLMHTLDFSYQALASGIAQHAEQRKNEIEKEKSEKANAQ

SEQ ID NO: 69088 - protein, 704 aa, Zea Mays
MQEFRGMLYKSMEDPHLDLAEIENIVRLLLELEPETDPVWHYLNIQNSRIHGLFEKCTQDHDSRMEVLQNKIREKVLSDSKWRQLQQDSNKSLEVDSTIGDSPRVDQLSTNFMAEEADSLRATYIRRLTSVLIQHVPAFWRLALSVFSGKFAKAASGNVVSDFDVNAKPTANKNDEKGGEVKYTNHTLDEVGSMVQATISAFDTKVQSTFRDFEECNILCPYMSDTIKEIAKACQTLEGKDSSPTAVKMLRTLHFEMTKLYILRLCSWMRATTKEISKDETWVTLSTLERNKSQYAISCLPLEFRDITVSAMDRIDTMILNLMSETAKSYDISQPLQEINESVRLAFLNSFLDFAGYLERFGGELTENRPNKENNYVSNGYINGTRETFVNTDGDLHKKLLVVLSNIGYCKAELSEELYSKYRHIWSPVRNNEERSSDMRDLRTSFSALEEKVLDQYTFAKSNLIRSAAQSYLLDSGIYWGAAPMVKGIRDATLDLLHILVAVHAEVYSGARPLLEKTMKILVEGLVDIFLSVFHENKTKDIRLLDANGFCQLMLELEYFETVLHTYFSPEAQQAMKSLQENLLEKACESVAEAMENPGHQRRPTRGSEDTASDDRQPSVSPDDLLVLAQQCSSDLLQGELERTRLNIACFMESTLQPTAAPAGPKPAAHSSYQAQHAPVQTSSPSFRRQQTGTSSPVVSRRRR

SEQ ID NO: 69089 - protein, 94 aa, Zea Mays
MQPSQNRSTRTFMDYDSVNHALDGICGLYERKIRNINPMVRNLTYDIGDLYNFIDGLTDISALVYDDSLHAFLPYDRQWIKQKLFQHLKRLAQQ

SEQ ID NO: 69090 - protein, 115 aa, Zea Mays
MSCWCISRWLLASSSSSCTSWSWISRISMVLSQIFTCYSRVAMRWLSCSTYRPFSTNSEDKLTTKSSRVTPGFKGQSRVHLIHAPKKTTYIIIEFIEINVTITSDYLLHSVSLTK

SEQ ID NO: 69091 - protein, 661 aa, Zea Mays
MPKDSRYRDDHVKEFKSRVQREGMALPSATVLWTASITFRLAQNMVVLFFLAALLAAPARSSSPSSNNGAGLQQPTLTLCSGHSTVAKSGEFASFLAAVCAGAYGGGVAHMSHSMSSYVAAENRTMYGVAQCRPDVSASDCTACLAAASSKLITGTACATSAVWHDACFLRYSDRDTGRFREDEHTETVFNASRALSSLPPHVGANKAVVVRRLLAAVADSTRSGHMCSDIGVGTGAAGGGRIYGLTRCAAEISCADCRRCLGGALAVVEREYNGSAGMQVLRLSCMARYESYPFYNTKFLTRRLLASATSGSPRPTHGGIVFNSSISFGPFGLVHSGGPNPPPSPPVSPPPPAFTTISVPASVGTAQPTPPPSRPAQAQPSPPPPAASMIVSGPATATPRAAQAQPTPAPPGGHNPPPASPPPASIMNISGPATATPTPRAAQPTPAPPGGPTPQPVAAATNENKGKGTLNTPKWQIVSIATGLVAAFIILALTVWCRRKQQLSQREHVIEPHVLNHQADGVPGETMHHLEKKHLGSEEDDDGGRTSCQLYSYLVLEAATCRFSSRNKLGSGGFGTVYKGTLENGKDVAVKRLRDSKRAIQELEREISIVASLRHKNIVRFLGYCFQEEGRFFIYEYVLNNSLDKFWYKGKFITPTINYV

SEQ ID NO: 69092 - protein, 141 aa, Zea Mays
MAGRTAPASLPSFSLTPDSLAAPLSWISSWTLPRPTIDIMSKFFKLMVVLQLMNDLNEVFKMPLSLVLRLIVCLRFFDLSIIPLRYWNKSLPPRLPQCRQVSPLQQVRDTLGRHRSLPLACSFYAAMRGGGISSNTLHVSL

SEQ ID NO: 69093 - protein, 104 aa, Zea Mays
MRAWSPCDSCSSSTPANLTPWPSLGSLELHPAPSSISSYLLCGSWELGSSPAAAPTQQYQHSRPPRRPPSRTPPVVESCRFSLPQRAATPSPVCVLSPAFLDQS

SEQ ID NO: 69094 - protein, 124 aa, Zea Mays
MYHVRTQVIELAAASVSPKNHRCTCVGQNKTKNPLAIGRAAGPGRRGWRRPCGPYRPGPEHASTGRESIAVMAPCRRPGTCCRLSTTLPGRAPRDHDHGAWVRARMQCRAPAPPIRWMAPAASR

SEQ ID NO: 69095 - protein, 108 aa, Zea Mays
MEGEADQGESGSWQSPRRRPSRRPARCRPSTASSATGSWAGPMATPSRPPPSPPSSRPPSRGLSSISGSWRSSPPLGNHSTAETVLTISSVVARPRPRIRSRSARVQI

SEQ ID NO: 69096 - protein, 293 aa, Zea Mays
MDDAGRAPPPAPAAVTVSATAAPAPTPPSATAAADKSSLDPDALYEEGMWQQMAMNSGATMQPGSYPERPGEPDCTYYLRTGLCRFGMSCRFNHPPDRNLAIASARMKGEYPERVGQPECQYYLKTGTCKFGPTCKFHHPREKAGIAGRVQLNTLGYPLLPNEKECAYYLKTGQCKYANTSLVHSHILELCQAGLFHELLLYQALGGKVLQIMHQWLYLMALSKCRAGIHILVSCSHLGLNKLMEVHNKAKLVQEIRECYHPIDPVHFLCLNMRCREIMYFLRDPMNQNANIT

SEQ ID NO: 69097 - protein, 287 aa, Zea Mays
MREVVTVQVGGFANFVGSHFWNFQDELLGLADDPGADPVFRTAALDMDVLYRAGETHQYSGDLILSDERAQIRNSVIGSWNLVITGLSCCRSGKVTKSVAKPHERNLFLQSLSEEEQNPSSSDGQNNASVEDKDLVANLENGVKFWTDYSKVQYHPQSLYELYGSWTDFDRFDNYGTAKEVVSEWSQMEEMNERLRFFVEECDHIQGIQFLVDDSGGFASVAAQFLESIVDDYTNTPVMLYCVRNPDSYGSSRNQCETIIRSLHDAVSLSKLSYYCNLMVTCHLCFL

SEQ ID NO: 69098 - protein, 207 aa, Zea Mays
MMSAGSFLPLFLSLMDLPMLVVALEKVERSSGTLIGSSIATIQKSAAPEMLLALMDEAYTGSAVEEPSGNSGSDDSGPLDLTDPMFLDLLKDENDGIAAKHWISPTISSTLQAAFNSPQSDRLKQSLEMAPRFLTLYFATALRDVNDSLLCALIPVVMSRYAAMFPDKVFSFKVRERLSDFILAAFQRSPNIIAVLKIIFLTVTEIY

SEQ ID NO: 69099 - protein, 557 aa, Zea Mays
MYFQHSLDLQIYFSDNNLTGPLPPSMGNLTSLTSLHIQNNQISGTLNVLQDLPFQDLNVENNLFSGPVPVKLLNLPNFKKDGNPFNTSIAPSAQPPIAPTPLPSIPPSSGHVPSKEPAHSSSVPGGSTSGSGKHTTLKLVGYILIGVVLAVVLVLIAMYCLSKYKEKRSRDDIYMKNKIGRVPQKLGEPKIKEPPLKLKNDAEKAPNVVSDGREEHKLKVPTSETSNVVYDPSPRDGAELRFITDSFSEENIIRDSRFGKVYLAKLPDGELLEILKIDSSNSKVPVDAFLELVVRISELRHPNILGLVGYCAEFEQRLLVYEYCSKMTLHDELRHVDDSSKPLSWNARLQVASEAAKALQHLHDGCQPPVVHQNFEPSVVLLNSTLVVHISECGLASLASKSVSQLSGHTLFHYEAPEVHESGSVSDRSDVYSFGVVMLELLTGRKPYDSSYPRAEQHLVRWATSQLYDIDAITKMVDPSIRGQCSDKALSRFADIISRCIQHEPEFRPPMSEVVQDLTRMMPLTTIDAVVGYFGQCKMGGTQWQDAETAPRFVHCQ

SEQ ID NO: 69100 - protein, 75 aa, Zea Mays
MATLLHACHGNKLYMGLTHHLPRRLPRNFLEMKTKETMMLLVPQTLMLSNVLLDTSTTSCEGSLLGTVPVRLGYS

SEQ ID NO: 69101 - protein, 496 aa, Zea Mays
MLTYPILNDRSIDQWTVTELKDELERRYLPVSGSKDELLKRLFEAMQDEILDGEGKTTVVTSPPEELKGGETPGSIDVSVNQASIEQHVHKGASEVAKQGVGLVISVTEAYDESTFATSEVTQEAVVGTAEVSQRSLDAVAEVESCLVDAAATDEPDGNGQGSASSGDTIVKEGSPRSEGHGNTIEKTPEDGTNKKIAVDDEPSDLTGGDIKLGLDVHSKILKLEDEPAPPHDMLHNHEDSDVVAVAEPEDDTSKKMISDDVPTGLMHTNVELGAKVDCKIEQEEVSTLSDAAALHSYPKEHIVAVAKGLALPRRMLMSGYTSNIDLDRKEESPDINSCEKLNLNRSSGDESMDEDVMERKHADSYIKPEDLRGKTKVTSEHVFKDVSLLDTRAEGSPAHSKEVVTEEKLSTPTEKRKLEDQEVIENNEPIKRQYLWNEDAVNISDQQASKITSTGTQKEVICPAPERSFGRPNTVARRNSPKERIELIGLCAHLL

SEQ ID NO: 69102 - protein, 148 aa, Zea Mays
MIISILSTVTSGVGLVEYFLMTLMITIKKCFSTSLQVKPFARMIGWNYLYSECADSVLPAYIPIIERRKDTPFNEEHKEWQQLRRGRYVEFNLVYDRGTTFGLKTGGRIESILVSLPLTARWQYDHKPEEGTEEWKLLDACINPKDWI

SEQ ID NO: 69103 - protein, 339 aa, Zea Mays
MEDEENIEGELLLVESQLHDIQGQIKTLLDRQEELYERQAQLKALLEASKLTRNTTINTSSVAPEDWSGSFPWDLEADDTRFNIFGISSYRSNQREIINAVMSGRDVLVIMAAGGGKSLCYQLPAVLRDGIALVVSPLLSLIQDQVMGLSALGIPAYMLTSTTNKEVEKFIYKTLDKGEGELKILYVTPEKISKSKRFMSKLEKCHHAGRLSLIAIDEAHCCSQWGHDFRPDYKNLGILKIQFPSVPMIALTATATSKVQMDLMEMLHIPRCIKFVSTVNRPNLFYKVSEKSPVGKVVIDEITKFISESYPNNESGIIYCFSRKECEQNSLCICNKERE

SEQ ID NO: 69104 - protein, 118 aa, Zea Mays
MVQELPALLVARRQLVARHVQRLWAEHADDSLLLCILMLLFSSDNINCNKHKMERFLHHGRDGEQSAIAAVGSLKSMDPNRIILKKIVLTMYPQSLESEIDRVVYVPRSQRRKMVQAY

SEQ ID NO: 69105 - protein, 122 aa, Zea Mays
MAAAEAWVRQEKVRKFEEFVDQRLKPDLTNAIAQRNKVFEQQKTFLDLKRNIENLERNGVTSMRSMVNLGSEVYMQAEVPDTRHIFVDIGLGFHVEFTWQEALQFISVREARLTRRGERQIY

SEQ ID NO: 69106 - protein, 224 aa, Zea Mays
MLGARVQLKGWQQAAVAFGSAFGALLDPRRADLIAALGETTGKPAFERVLQRMKNSAEVLSERPRVVSSQVSHAWDLPQNTFGAAYAQFMGSRNFSPDDRPPVRFMDTDELAYVATRAREVHDFWHVLFGLPTNLIGETALKVIEFEQMFLPMCMLSVVGGSARFSDKQRALFFQHYFPWATKAGLKCTDLMSVYYEKHFHEDLEVVRRNWGILPCPSPKKSSV

SEQ ID NO: 69107 - protein, 279 aa, Zea Mays
MATMSDEEIAKIHPDHNRKSLSSLLPRLHYYQGGNCMVHDMFGHEVVGKIKEQYCDAFLTAHFEVPGEMFSLAMEAKRRAMGVVGSTQNILDFIKDHVMGALDRNVDEHLQFVLGTESGMITSIVAAVQELLHLYSSQERANIEVEIVFPVSSDAISKTSNGSHHVGSSMATDLNSLTIVPGVSSGEGCSIHGGCASCPYMKMNTLGSLLKVCHQLPDKNNKLSVYQANRINVRTPLGKSVAEVGCEPILHMRHFQKTRRLPDKLVHQVVNGNGDKPLQ

SEQ ID NO: 69108 - protein, 645 aa, Zea Mays
MEETHNTLKFASRAKRVEIYASRNRIIDEKSLIKKYQKEISSLKQELDQLRRGMIGGASREEILSLRQQLEAGQVKMQSRLEEEEEAKAALMSRIQRLTKLILVSTKNNIPALTDGHQSHNSLSEQDLITSQDSSTLVQTEGTTKDPLSSALPDSLDEINQLRSGTGEQSSVTGSATDSMQVGFTASDHMDLLIEQIKMLAGEVAFGTSSLKRLIEQSIDDPEATKDQIENLEREIQQKRRHMRALEKQIMESGEASVANASMMDMQQTITKLTAQCSEKAFDLELKSADNRVLQEQLHQKNLEIYDLQEKVLRVEQQLSAKVDISPEKETDCAQQETIDLKSKLQSKEAEIEKLKYEHLKISEEHCDLINQNHKLSEEAAYAKELASSAAVELKNLAEEVTKLSVLNAKQAKELLVAQEMAHSRVHGRKGRTASRGRDEVGTWSLDLEDMKMELQARRQREAALEAALAEKELLEEEYKKKFDEAKKKELSLENDLAGMWVLVAKLKRGALGISDLNVDDRTVNLADITNSTKENKGGKNFALVEKQASEDSVKSLSSEEHTSPEFEPLLVRLKAKIQEMKEKDIDPLTDKDGNSHVCKVCFESAAAAVLLPCRHFCLCKPCSLACSECPLCRTRIADRIITFT

SEQ ID NO: 69109 - protein, 662 aa, Zea Mays
MVMSESDDDDDEPQLNAVESYYFVDSTNDNEPVCFSTLPFLFGDTDDLPDCKKRLVLRGTGGDPGVKVYSEVVAWSLGLEGKQPQFAVLTAEGRRWVRLVRPLNSYEEMIRTVLITAHMLHFLMRKPHEPERTLWNHLCKVFNKFDVRPSEDDFRNHISLMKQFVAKDPILAKSEILRVFVEGKSGKIFTEAGADHIDVKQPFITDDEDIDEMIVEDADNESDEEEDGDLFDSICAICDDGGDILCCDGPCMRSFHAKEGSGEDSYCDTLGYTEAEVEAMKLFLCKNCEYKQHQCFICGVLEPSNGAAAKVFLCNNATCGHFYHPKCVAQQLHPNNIDEASELEKKITDGFSFTCPIHWCFHCKGLEDRTQGPLQFAVCRRCPKSYHRKCLPREISFDEIEEKGVIIRAWELSKMILIYCLNHEIDSELETPVRDHIKFPRIEKPLQFVKKGANLLPKKKKRTYSESILEQPPKDTVKMKSKVRMQESEQNKHDTREVSVKSFTQNVVDTPVKKKGKLKENKQLPYVAKDHFVSSPKSVKEQEQELVPLPLSGIRKSSFPKVDSEIEKRVISILGNEISSLTIKDVTRNCSLPSTHVYSGRPTDKMPLGKIERSVQAVEAALKKLKNGGSVNDAKAVCEPDVLRQLARWHSKQICNRCGSDF

SEQ ID NO: 69110 - protein, 104 aa, Zea Mays
MLDALHRLYRWKKSGRVQETPNVFFGCSPKNTVWHFFHGNGSMFLNCYLVGWYYSFIATLDQNSSGRRHVPSPYAASAMYSSHLLQDLWRSVSLFHPASGLDWY

SEQ ID NO: 69111 - protein, 267 aa, Zea Mays
MLAEGIGLSGIISILFTGIVMKRYTFSNLSDDSQRFTARFFHLLSSLAEAFVFIYMGFDIAIERQSWSHIGFIFFSIIFILVARAANVFSCAYILNLARPPHCQIPRQYQQALWYSGLRGAMAFALALQSVHDLPDGHGETIFTATTSIVVLTVLLIGGSTGTMLEALQVVGDSNRYCQLYELQESSNGNDTGYTGQNYDEGASTSSKFRSKLRDLRRSTSSFALLDRNYLTPIFTSQNGDCNDNTTESPNEELTIFRGPGDLEVHD

SEQ ID NO: 69112 - protein, 276 aa, Zea Mays
MSPERIRNENYSYAADIWSLGLTILECATGKFPYDVNEGPANLMLQILDDPSPTPPVDTCSLEFCSFINDCLQKDADARPTCEQVKIIRLLSHPFIKRYAGTEVDLAAYVKSVVDPTERLKQIAEMLAIHYYLLFNGPDGIWHHMKTFYMEQSTFSFSENVYVGQNEIFDILSNIRKKLKGDRPREKIVHVVEKLHCRANGETGVAIRVSGSFIVGNQFLVCGEGIKAEGMPSLDELSIDIPSKRVGQFREQFIMQPGNLMSCYYISKQDLYIIQS

SEQ ID NO: 69113 - protein, 67 aa, Zea Mays
MPHSHLCFGMVWFIVAACKKFTVRAFGDCRVCYLGLELGVWVTLAYLSQPCFACYTIRQQTASQGSL

SEQ ID NO: 69114 - protein, 241 aa, Zea Mays
MLVTLSHSYVMQEASWKETIHQLYGTRVAVLAGDFMFAQSSWFLANLENIEVIKLISQVIKDFASGEIKQASTLFDCDVTLDDYLLKSYYKTASLIAASTRSAAIFSGVGSGVCEQMYEYGRNLGLAFQVVDDILDLTQSAEQLGKPAAGSDLAKGNLTAPVILALREEPRLRGIIESEFCEPGSLAAAVELVHRGGGIRSARELAEEKGGLALRSLQCLPRSEFRSALERVVHYNLQRVR

SEQ ID NO: 69115 - protein, 590 aa, Zea Mays
MPQVKSSYDGAGGDYIKWMCGAGGRPGGAMASLHRGVGSLVRDISDPCLNPSPVKGNRMLKPERWHACFDSDGKAICFRKALKFIVLGGVDPSIRAEVWEFLIGCYTLSTTAEYRGKLRAARREKYRYLIKQCQSMHTSIGTGELAYAVGSKLMDVRTLPKETEGGEVSTSQQAEHEVPCSLAENSNLIYGSGCTTRPHKRKICSKSAETVGFNQHNDNSRGSGDCDVIGEPRYDSDAFIDFPSLTGTNLVANGDGDSNGVEENPCNFLVSEHRVRPHDEHMHSFQINNNIDLIIESNTFSNDIFRPSSSDSAIFHSDAYKHDRWLDDTGYSEEIIDSLRISDAPESDLVDGMKSNGSIADKDRVSEWLWTLHRIVVDVVRTDSHLDFYGESRNMARMSDILAVYAWVDPSTGYCQGMSDLLSPFVVIYEDDADAFWCFEMLLRRMRENFQMEGPTGVMKQLQALWKIMELTDAELFEHFSAIGAESLHFAFRMLLVLFRRELSFEESLIMWEMMWAADFDEEAVRHLEENCLEPLLVDLSNGLSSEVKEMFNDNVLKINVKRCVRLAIKLRKKYLYKSLKGGSSDDKES

SEQ ID NO: 69116 - protein, 300 aa, Zea Mays
MFAYLLGLFVPWRLLAVIGTLPCIVLIPGLFFIPESPRWLAKMNMMDDCETSLQVLRGFDADITAELNDIKRAVMSANKRATIRFQELNQKKYRTPLIIGIGLLVLQQLSGINGILFYASSIFKAAGLKDSDLDTFALGAIQVLATFVTTMFLDRAGRRILLIISSAGMTLSLLVVAIVFYIKDNISHDSDLYDILSMVSLVGVVAYVIAFSFGMGAIPWIIMSEILPVSIKSLAGSFATLANWLTSFGITMTANLLISWSAGGTFTSYMIVSAFTLVFVIVWVPETKGRTLEEIQWSFR

SEQ ID NO: 69117 - protein, 66 aa, Zea Mays
MAGVEAGWDAQHRRRQETTTVSRRSRRGGRWRWRRGGGPEMASSGRVGGGHGRQRGPMGYAALETA

SEQ ID NO: 69118 - protein, 112 aa, Zea Mays
MRRRGPARAGGGACRDAGLIGYRCARGPGRPETAGGNCGRRPLAGWISPRGREDAFFILGWCVCGLECCAHRDTQTSPTIKPNNEEMGRRHSGPNISVCYHSQTDPNTFVLY

SEQ ID NO: 69119 - protein, 55 aa, Zea Mays
MTSRRVWTPSSCLTSVGNRGSPCRPQRDTTHREWIWQSTTWALSFVHCCSCWTQS

SEQ ID NO: 69120 - protein, 483 aa, Zea Mays
MGVMRKPMTCCTSAAHWVYSRLGSPDELSHFLLSLLESLPSLAIHGFVLPLALQWISPMLKRDSNSVLYAMAVRLLCKIWAVTDWAFPNLQVVLDPENFSNFISDREISASIATSIRDVCKQNPDRGVDIILSVSFCIESRDSVVQALGLESLSYLCEADVVDFYTAWKVISKQVLDYYVEPAVAHSLCILLRCGAMDAEAYSVISGNLVRTLWRIGTSKKNNPDPLWDKARGTAFHSLSNYKVSLIQDAIPDFWKLNYEFFTNEHNLAVLKAMEHLQDEIIRYEHINRRRVTTDKRTAVHKFEKLLEVFPRAVFKGMLSHHQLPGAALLTLNFTPKDILNEGKPKDLPRVHSAFEQAFVEIAESMYVSRNIVVALLALQSWKSFVSNWMQAVVALLDTKDSSKLNKAMKAANDIFKILCDQVPVSTPQVVVNIALVIGALALIVPPTAHLVVSSVSDFLLKWLLQYEHEHKQWLSQKLKAVL

SEQ ID NO: 69121 - protein, 640 aa, Zea Mays
MFIMPGLIFALYVTGSLNVVISPEHRHEICRYIYNHQNEDGGWGTLILGSSTMFGTCSNYITLRLLGEEPYANNSVLAKGRAWILSHGGATLIPQWGKIWLSVLGLFDWSGNNPIFPELWSIPQFLPFHPGKFWCFARMVYLPMAYLYGKKFVGPITPTILALREEIYDTPYGKIDWSDARSKCAKEDLICPRTLLQNVIWTSLYRCVEPVLSSWPINKLRERALGNIMEHIHYEDENTQYLCICPVNKALNMVCCWVEDPNSDAFKRHLARIPDFLWISEDGMKAQVYDGCQSWETSFIIQAFCATDLVNDYGSTLQRAYEFMKNSQVMRNHPGDQRYWHRHRSKGSWTLSSADNGWAVSDTTGEALKAVLLLSKISNKNNLVGDPIERERLHDAIDCLLSFANKDGTFSTYECKRTYSWLEILSPCETFPNIVVDYPYPECTSSVLQALILFKDLYPGYRTEEIEALVRSAATFIETKQQEDGSWLGNWGICFTYGAFFSIKGLVASGRTYKNSPCIRKACHFILSKQLSTGGWGESHIAIETQVYVNLKGDRAHAVNTAWAMLALIYAGQFERDPTPLHRAAKELINMQLETGEFPQQEHVGCFNCSLYFNYPSYRNLFPIWALGEYHRGLRAKKDN

SEQ ID NO: 69122 - protein, 433 aa, Zea Mays
MDALSRPAVVIDNGTGYTKMGFAGNVEPCFITPTVVAVNDSFSGSGQPAARGAPARGNWLAQHSAGVMADLDFYIGQEALARSRASSSHSLSYPIRNGQVENWDSMERFWQQCIFNYLRCDPEDHYFLLTESPLTAPEIREYTGEIMFETFNVPGLYIAVQPVLALAAGYTTTKCEMTGVVVDVGDGATHIVPVADGYVIGSSIRSIPITGKDVTQFIHQLLKERGENIPPEESFDVARRIKEMYCYTSSDVVKEFNKHDREPSKYVKHWTGIKPKTGAKYTCDIGYERFLGPEIFFNPEMYNNDFTTPLQVVIDRCIQSSPIDTRRALYKNIVLSGGSTMFKDFHRRLQRDLKKIVDARVRASNSRLLSGDAKAQPIEVNVVSHPIQRYAVWFGGSVLASTAEFYEACRTKAEYEEYGASICRSNPVFKGMY

SEQ ID NO: 69123 - protein, 578 aa, Zea Mays
MSFNHQIRGAVTALSFRTDGQPLLASGGSSGVISIWNLEKRRLHSVIREAHDGSIVSLHFFANEPILMSSAADNSVKMWIFDSNDGGARLLRFRSGHSAPPRCIRFYGNGKCILSAGQDRAFRLFSVIQDQQSRELSQRHVAKRAKKLRVKEEEIKLKPVVTFDCAEIRARDWCNVVTCHMDTPQAYVWRLQNFVIGEHVLTPSSSTVTPIKACVISACGNFTILGTEGGWIEKFNLQSGFSRGSYIDTSLAMQCAHDGEVVGLACDARNGFLISAGYQGDIKAWDFKTCKLKSRLDVGKSVTKIAFHRPNGLLATVAGDMVLILFDTVSMKMVRRFEGHTDRITDLCFSEDGKWLISSSMDGTLRIWDISLARQIDAMHVDVSITSISMSPNMDVLATTHVDQNGVYLWVNQSLFSVSTNTENYASGKHVRNVCLPAVSSTERSEEEQVQNLGESYKSSIKPFVITDHQIPNLVTLSLLPKSQWQSLTNLDIIKVRNKPIEPPKKPEKAPFFLPSVPSLSGEILFEPPASSKDTDISTTKNTNHKMSELSSHFSQQLQFCGETKNLHLTLIDRHISY

SEQ ID NO: 69124 - protein, 340 aa, Zea Mays
MQPLHQPPMNGQHGPPPPQGSGVPTASQQQAPPPSYYQQQQQQQQGPPPQYYQQGPPQPWAQQQQYAPPPPQYPPQMQQYAPPPQQYAPPPQQQYAAPPQQQYAAPPPQYAPPPPQYAPPPQQYAQPPQYAQPPQYGTTPGSGEVRTLWIGDLQYWMDENYLHYNAFAPVAQQIASVKIIRNKQTGHSEGYGFIEFYSQAAAEHTLMNFNGQMMPNIEMAFKLNWASASTGDKRGDNGSDHAIFVGDLAPDVTDSMLEDVFRANYPSVRGAKVVVDRITGRPKGYGFVHFGDLNEQARAMTEMNGMMLSTRKMRIGAAASKKNTDAQQTYATNGCHAICI

SEQ ID NO: 69125 - protein, 57 aa, Zea Mays
MIKDYLNWPHALDMGQGKLEPGYSIREKTTAHWAWEMVGVACTLLARGWTEEYCAPG

SEQ ID NO: 69126 - protein, 75 aa, Zea Mays
MSYSIFNFCHGLLTSESFAAAAAGCHRGRDFLLSPPRLAQLAPTPGLLASPPSRIRKLSRLSLLPLPRGNFSSCR

SEQ ID NO: 69127 - protein, 54 aa, Zea Mays
MRFSFSSIRSTYAHNRLRSAMRHPWCLVHWVYRFPTTARTLHAQRGVYSRLIVL

SEQ ID NO: 69128 - protein, 341 aa, Zea Mays
MFAAEIFMHRFLLSSAVRTFNPEEADWFYTPVYATCDLTPSGLPLPFKSPRMMRSAIELIATNWPYWNRSEGADHFFVTPHDFGACFHYQEEKAIGRGILPLLQRATLVQTFGQKNHVCLKGGSITIPPFAPPQKMQAHLIPLDTPRSIFVYFRGLFYDTSNDPEGGYYARGARASVWENFKNNPLFDISTDHPPTYYEDMQRSVFCLCPLGWAPWSPRLVEAVVFGCIPVIIADDIVLPFADAIPWEEIGVFVAEEDVPKLDSILTSIPTDVILRKQRLLANPAMKQAMLFPQPAQAGDAFHQILNGLARKLPHGDNVFLKPGERVLNWTAGPPGDLKPW

SEQ ID NO: 69129 - protein, 525 aa, Zea Mays
MEERSCGSPLRALILTPTRELAKQVCDHLKDVAKFLGIHVVPIVGGLSMEKQERLLKKKPEIVVGTPGRLWEHMSMNNQHLVELHSLSFFILDEADRMIERGHFRELQSIIEMLPLTNGSDEQAARTMPNCETVPILQIKKRQTFVFSATLALSSNFRKKLKRGLSTSKASTPDDVSSIEALSKQAGMKSNAEIVDLTKASILPEKLEESFIECSEEDKDAYLYYILSVHGQGRTIIFCTSIAALRHISSILRILGINVLTNHAQMQQRARMKAVDRFRESENSILVATDGFARGMDFDDVRTVIHYQLPHSTDVYIHRSGRTARKSLAGCSIALISPTDKSRLSLARQIDKIARKTSQENANKSWLQRNAESMGLILDTSDSEEDHVQGHKKRKATSAHLQKLQQELSDLLQCPLQPKTFSRRYLAGAGVSPLLQKQLEELAKRNASNNSSKSKNKGSGFVVIGQDRVEPLQALQNSGQEVCVNIDKEREKRRVAENWRRKKHEEKKRTQEQKRKDKRKAKEMA

SEQ ID NO: 69130 - protein, 525 aa, Zea Mays
MKEKEVHTNKKRIFARTRKAATKTSDNISTNQENKKTDNCKLKRGADSFKEKKVNNRAKSKAEVSAASSVPEICMQSSIDGSVIEKKPLVPLYPPRAKSVVVVESATKAKVIQKYLGDMYEVLPSYGHVRDLAGRSKSVRPDDDFSMVWEVPAAAWTHLKSIKVALQRAENLILASDPDREGEAIAWHIKEMLEQQGVLGFDVTVARVVFHEISEDAIKKALMSPRYIDMDLVNAYLARRSLDYLIGFGISPLLWRKLPGCQSAGRVQSAALALVCDREAEIEQFKAHEYWTVQTDFKIQSADPSNATCIPFCIKHLNSKKLDQLSIPSQEEAQAIEKMIHSSTFEVLGVKRSKIHKNPPLPYITSSLQQDAANKLHFTAGYTMKIAQNLYEGINLSSEETTGLITYIRTDGFHISDGAVEDIRSLVKERYGQKYVSEDIRKYLKKVKNAQEAHEAIRPTSIRRPPSSLVGILDDDSLKLYTLIWKRTMACQMEASRTEMIQVDVGIPEGEMNFHSTASKLDFKG

SEQ ID NO: 69131 - protein, 213 aa, Zea Mays
MPDEDEFDHFYRVVAKKTDMLLSCHLPKPLAVSEEEKAVQEKFKEMANECIDLLVDAMRRIPAEKRRPLFSVFGELYPVFESVRWTAEGGCAKWWMALQIMEKLEIVRKMVSSACGGTPLDRGTVFARKVDLTGVDGQALAGHGLGSNLSVEDVHGFMLFTMNIICLHACCFLILGETNTGGDLRAAPQRLQQRQVGHRWHGLCFHSLLAIVT

SEQ ID NO: 69132 - protein, 297 aa, Zea Mays
METAGQTTLQESAVHARRQAACWWPLDTTACSSLDLDDASTFSSSSLLLGWEWDPQLCCFGSPHARDSELFGPTCMESPVSEASAAAATGELDDELLLMSLWGECHLFSSCSALKEKTATSSQRTPKSLQSDDDHHSDLPTSPAKTTPATAQAAEPSHCDVDLRASYTGGAQQQQQQQHRTTRAANSSSKRSATEPEEKGAEGGKRSRKAPGSTAVAAYPFAVVKPGGADGGVTLADINRWILTPPARPVRHPVGEFACAPRVSAANRPGPSGRTVAGFTRLRTAGRGTITIVRTRG

SEQ ID NO: 69133 - protein, 546 aa, Zea Mays
MSRCFPFPPPGYAKTARPDGQLASHLQQQQQLDKEKQKEKKHKKDKKDKVRKEGKEKKDKDRSKDKHKDKKDRKEKHRDKKKDKSKDKSRDSGEGIERNDEAHHGQKVGESSRRSEEIKDLKFREDLVRDVQDEKGAASRPSENYGVSNDRNRKGFSASPAMETERFALNKVHIQSSNAPRKNEGLVQQSISANRQKNGTSIRHSESLTTFAQRTVGGFPPAPSTEEKFKAARPLSNTEAAPRKEGIGQRISNISILVPKRTENTNRDVAKKEVGTSSPLPPNPANAMHKGNDKVGRPMENTQVPMQRFGSPSMSTAAVGMDRGTPRSSIPSPSITIRRPNGIVRPPKNISVSSKKPDAGDVSPAIGKEKEQGGRLLQANISTDQKLVMSKPPAVEKAAHGSAERTEKVSRDGVPDVAKKEDKKSDRHEKKKRKEKDKHKERKKEKEAKKEKEKHNYKEHDKTRENNISYPVDSLNLKPSAPPVAPPVDGGKSVVPDENLKKRKNHETNGYLQIAETSPPHQSCGEWYSISCSRATLFCEARSHYQ

SEQ ID NO: 69134 - protein, 431 aa, Zea Mays
MVSGNLLYRRKRSWRADEFVSRSTLQLLDFDDGSPPEHAWRRKLSSHANRLKEFNVTFREAIRMMKLGLRLWSYIREEASHGRKAPIDPFTREGNKPSASQGVPLGGMGSGSISRGFRGEFKHWQITPGSCEMSPVMANQFSIFVTRGGTKKYASVLSPGQLDGLKKSTDDGISSWDWKLKGDRSTYHALFPRAWTVYDGEPDPELKVSCRQISPFIPHDYQESSLPTSVFVYTLVNTGKERAKVSLLMTWANSIGGLSHHSGDHVNEPFVGKNGVSGVLLHHKTANNNPPVTFAIAACENQNVNVTVLPVFGLSGESSVTARGMWGTMVQDGSFDQDNLNTGPSMPSLLGDTVCAAVSASTWVEPHGRCAVVFALAWSSPQVKFKKGSTYYRRYTKFYGTSPRSAVNLVEDALMRMTHAAGAGPLLDSGA

SEQ ID NO: 69135 - protein, 67 aa, Zea Mays
MLGRVYISRRRRRRRGRQRLRDRRQGKQDLEGRAGRRAARRHQERHVRAAAGPAPQPRRPQWHCLPP

SEQ ID NO: 69136 - protein, 143 aa, Zea Mays
MGGRIFPQQPCSALAAEASARPSFFLVHAATTISMAARLSPSCSVRRPRELAGDLGPSSKLVPVRRPAARTRPQPHLPCSTAFPRPASRSAPSSRASLCSDLAQPRRTLSLPRRRVAARPARSARPGVAQPLCSPVEFFASRA

SEQ ID NO: 69137 - protein, 589 aa, Zea Mays
MRGEYPLGIVGQTHLLHSGSMDHLDRKYDSNEASQSLMEVAEGNIDDGNSFSSSSVIQEEGLGDSKSQNTSGQISPIASSDLYRLKEYDSVEESSFPKATCFSGADKKSLHMGHADEAKSVEESPHQVDQLNGPQNIESSNECNQVGLLKEDDCISLVHVDNVHDMKNIYSSEVRDETSICAPAGDYEQVPTNSERKTSHGRELASEATTSNNHGGRSQGVKSGLMGEDFVPSWQEFLPDGLEGKEAILLADCTSVLRNYKETKRRLSELERRNQEHLEETKAVIRELRNANSMKYVEIRSLRDLLDSSEVPPSKAGGNSNGFLSLRSFREIDRSIATLGRDISAVEENSSSNIETPNNTSLHKMTRFRNDIDALVEENLQFLVRYSMACYRMQEFDRRYQEAQDEMEDNKSREPDTPAEPGPAEKKLRELRTELDVWFEQSALLDQEVQLKSASLCRMQEEIAEALRGSLEMDRARFTPYEAAKFQGEVLNMQQSTSKIEGEMQAASEHMRGLQAKVSHALEGLRESFEISSQRLSRPETERSHEKQFKHFPSRTRVPLRNFLFGTKRKKKSIFACINPTFQKQFSDL

SEQ ID NO: 69138 - protein, 200 aa, Zea Mays
MAECKDDDSGRRSPSSSMDSSTHPPALSTASSASRRPPERRDQLSPDLQLGLSLSPASSALLVAETNNSIVPSTPRNQALPDWPPIKPFLRSALTASARRRRTLFVKVYMEGVPIGRKLDMLLLDGYSSLLAKLCHMFKASITYADAVEYHQRVPHEKAAHVLTYEDHDGDWMMVGDVPWELFLGSVKKLRIARTDRVES

SEQ ID NO: 69139 - protein, 486 aa, Zea Mays
MGENSSEETSGAGTRASMERVKHENFCRAVAEDNTALLLSAVGNFRKEALCRIRKGSDASRVLDQEMSVRLLHLACKHDAVECATLLLEGGSGITAAPIDARDQLTRTPLHVAAETHSARCIELLLSKNARTDLRVVDGRPLLPLEIALMSRRVQTNWSVDNPIEDLLSFLKQRDLNAVRLLAEKTRVVGELAYRYAMEGCVPALTMLLLVVEEKISSQVSVVIEGVRTKRSIYNSIVDEALSTGDTSARDGHERRKALLCEIQLLNQFGSASWRDHNDKRTLPPLLRAAKVGDMNVIKMLLMGNVDVNEADSEGNTALHWCLSGASCTKEPRIVWLLLKNGARVFQGNKLGLTPVHSAAAKGNYKALQSLLLHAQDCVDIPTKTKETPLFFAVKNGSVDCAKLLLRFGADTKARNLRKQRPIDVATSQDMRFILSSANVLLFSGNHNSPQKNRVMRKEIYKELGDEFDDFDKDSCDESYTGLKTS

SEQ ID NO: 69140 - protein, 801 aa, Zea Mays
MERDTFQEVKSKRDKKKEIKEVPETRYRSANSSTNRSLRSGADRGGRSNSVHSSSTDNMTSRPPVSGSCTASVNSNQMQTIASSSANKHMVTDGLAVSLQSSCGFQHGGWSGTPGQLSMVDIVKMGRPQGKASSKPVVTADRGYAGQYPSLPSTNQNLKQSGSMVSPAELDKGLQPAHNLVQVKNHGHFTADSKLPYGTDWSPQDDPTSENQSSQPETSGDPSLYESSFQSSTLVTDVVNSHENSHLELDENSTFAMRSTPASERHLEPSDSIPEYNDGILNNSSSYQPHNYSYTEQDVEDSSADVSAAAENFQSLSLHNDELAAKKTAEDNPAVIIPDHLQVTNTECVSLSFGSFGSGAFSGLLPQKTTDSNVEFLVQEDSATVDPIDARNQDYYESGAVTSPAEENLEAMLGTNMENVDAPSVSQANELSQDVLDPSVLKYDVSSVSSHAYSNMNTPQPSTIEDPQGNNQAHTLSHLSNMMQANPLSTSSLLASNQNHPSLHGLEFDLPYLEAKYNAGTTTNPRPAISMQEALKAGVFSNARSTQSLPSTSIPTGHPLPQQLAHHPYSQPTLAPITHFPNIVGYPPYLPQNYAAYLSSGTFQQAYPSNGAFHQSAAALLGSGMKYSAPEYKNNLSATGLQQQHQPQPQPPSSVISGYGGLGSSSNIQGNFTLNQSTGTGSTLVFDDALGRQYKDTSQHIALQQPDNSGMWLHGSGSRAAALPPNHFYGYQGQSQLGGFGQAQQQQPSQFGGHGYPTFYQSQGGLTQEHHPQNLAEGSLNGFQVAPSQPSHPSWQHQHTY

SEQ ID NO: 69141 - protein, 826 aa, Zea Mays
MEDVLTPPPQPELAGEKRKREESSLDASIEDAPSAPASTCSAEDAAGSDVARHPMWKTSLCSFFRRRGAGAEGCSHGDSCRYAHTEEELRPRPDGTWDPTSDRAKELRKVAAEAQEEAEEEVTVDEQSLDKCLVGLPRGWTADRLKSLLQDQGISYATAKKKKGMTVGFVTFQSVEQLTNAVQVLKENPSDGKQIKIVDANRRSHQKAHAGAPVSNTGTATENGSSPTTPAEETSVPESVSSSKKGARDAVTPLAHMTYIDQLEHKKQSMAQILKKLTRNARKACPPTIPHPDWVFKSKEIGYSLEGKKTVGFMLGNFREGVTAVEEPENCPNVSEISCKYAKMFQDFLQSSSFPLWSKIDNSGFWRQLTVREGRCPAEAVVSQNAESQISEVMLIVQVCSTSVDEALMKEEFDKLSAALVQGAATCSPPLPLTTIVVQDHKGISNAAPTDCPLIPLLVPKGDKLDGTSEDKTRIHDHISNLKFSISPTAFFQVNTLAAERLYALAGDWANLNSDTLLFDVCCGTGTIGLTLAQRVGMVVGIEMNESAVSDAHRNALINGIKNCRFVCGKAEDVMGPLLTEYLGSPQQQAAASKSNSEIDDTSKTEDMIGCASYDGENIDSSKQRHDNAEGQQPMDTSVDHPTCASEVDGMDVVDCNHDENNVASGEQNCGEASLINGKPIETSSDNSLEQGKTCKDGSSSPNNNVLAANACQFKNVVAIVDPPRVGLHPTVIKALRTHPRIRRLVYISCNPDSLVANGIELCTPTPEKQEKNKGNRGWRSMSSAGLARQRTKSMPNSEPFIPKRAMAVDLFPHTPHCEMVMLFER

SEQ ID NO: 69142 - protein, 280 aa, Zea Mays
MLCCNCKSFFPHEKICSSFFSRSLRTLFLEECIIADEGSEWLHELAVNNSVLVTLNFYMTELKVEPADLELLARNCKSLISLKMSDCDLSDLIGFLQTSKALQEFAGGAFFEVGEYTKYEKVKLPPRLCFLGGLTFMGKNEMPVIFPYSASLKKLDLQYTFLTTEDHCQLIAKCPNLLVLEVRNVIGDRGLEVVADTCKKLRRLRIERGDDDPGQEEQESLSDRPDSRSCRLRELEYIAAYVSDITNSGFSHQSAIGIISGFGGDDFSGIFVEGMATAPV

SEQ ID NO: 69143 - protein, 350 aa, Zea Mays
MAAAAAAGAASSILSSTPPRRLTFPPAHIRKPLAAAAPKALNLSSQKLPPLSSSATASPPPPPDGDDKPDPIKLAFARAAAYKKGRDSHSPSPSPAPAPPPTPPPQSSPPSQPQASVSEPGSKEAFKRALEYRNGNGAGAGAAGGDSPLLGGSPDFGQNALISEEVSFGKRGGYEFDEADFLGLDFFEKKRSKGLPPGLAPAFEPLRDDDFPEVDIIVGDPSKFDKSPRRTEIQPVDNGESGEASQSTTKPNEADKAGIAPPSTVIETEEDEDVYRPTVRSWGMFPRPQNISKAYGGGRNIRLGGETQSAEEKAAKDKRTKELIAAYRNRQNMVIDAKTKAECIKFSSLL

SEQ ID NO: 69144 - protein, 169 aa, Zea Mays
MEVPPLPTASEGERRSVATGSCLPRLVSGVLSGALTGIFAVAGGLTGAFTGALAGRASDSGVLRGAGLGAFAGAVLSIEVLEASRAYWSADRSSPQSTSSMGDFIEQLLHARFVQDQYEPSAYMAYRWQDVISGETARKLPKCSHTFHQPCVDRWFIDHGSCPVCRQDV

SEQ ID NO: 69145 - protein, 695 aa, Zea Mays
MEPRRRERRVIAIAGAAALVAVGLNIAFSAVVAHRRRKRRELPGFTAQVNLSAAAIKRTTDRIISKSRETYDSVAAVPLDKVSFANVIAPLAELDALQFPLVQACVLPRMVSPSEDVRKASAEAEKLLDSHFVLCRQREDVYRVIKAFTVKGERIGPEATRFLQFLVKEFERNGVKLSQSKRKEMEKLKSHIDALNLKYLQNLNDFTKFLLLGEDELAGMPFEFLKDLEKADGKFKVPLTSYHVTPVLEHCKVGSTRKQIAVAYGQKGGKDNVAILENLVQLRHKFAKLLGYTNYADFAIEPRMPKTSRKILEFLEEMSEQLSDVANRELNILKDLKIKEEGNAQFGMEDLLYYIKRAEEFKVDLDVGEIKQYFPVGLVISGMLKIFQDLFALRFDEIKDVDVWHDTVRVFSVWDASSSDLLGYFFLDIFSREGKYAHTCVVTLQNGCLCSNGTRKVPAAVILSQCPKEFDGNSALLRFPEVVRLFHEFSHVVHHVSNRATFSRFSGLRLEGDFAEIPSLLLENWCYESISLKMMSGFHQDITKSISSEACQSLKRRRDLFAGLKMKQEILLCLVDQIIHSSENVDIDDLIKDLHPKVMLGIPLLEGTSPASSFPRIAFGYDAVCYSYIWSEVFAADLFVSKFKDDLLNQHAGLRFRNKVLAPGGSKDPLEIITDYLGREPSLQPFIQSRTRNSL

SEQ ID NO: 69146 - protein, 56 aa, Zea Mays
MLDRSCQQIHALHGSHSALQRHVRSESPRTRPENGLAYIWTAPGTGVWKNTSDYYR

SEQ ID NO: 69147 - protein, 422 aa, Zea Mays
MATQALAPSLRLLLLLPLLAAAAAAAALSHPAHEFCAVGGDASGCGGGGDGTRILIKGGTVVNAHLAEEADVYIEDGVVVAVRPDIPVDVDNVRVIDATGKYVMPGGIDPHTHLEMEFMGTVTIDDFFSGHAAALAGGTTMHIDFVIPVDGNLTAGLESYKHKAAKAAMDYGFHMAITKWNDEVAREMEVMVKEHGINSFKFFMAYKGSLMVTDDLLLQGLRKCKSLGALAMVHAENGDAVAEGQQRMIDLGITGPEGHALSRPPILEGEATARAIRLAKFINTPLYVVHVMSIDAMDEIAKAKREGQRVIGEPVVSGLVLDDSWLWDPDFTIASKYVMSPPIREAGHGKALQAALSSGILQLVGTDHCTFNSTQKAFGSDDFRKIPNGVNGLEERMHILWDSMVETGKISVTDYVRVTSTE

SEQ ID NO: 69148 - protein, 533 aa, Zea Mays
MEPFSLKSCLLPHSIKDQNTGSWTRFVNDCGTELIRLQIREHKAKNSMAVVRELVGVLKSTKKQIQLAEFKENKWTLKDSNLPISHGTDGSLLDLKGDNHLIKLYRGRKLEYERKCCSAHSEDVSAVTAVKFCAEHPYGKAVALLDTEAQLIMVNEDWLLLPWISISVLFMDGDGGTKLGGGAMVQKGTVFGSDTSMVLETQTVGAGSVASNLAQCGTCSAVFGGDDKEMANCKVEHASSGASRTVVASGENGHTETAGCGGGCGSNCGPMMAEDPKAGNAKSGGCGSGCGGGCGGAGGCGTMANEGQSRSGGVGTLLSSNAMGGEGQQAHSAGCGSGCGGGCGSGMVIEGSKANNAMSGGCGSGCGGGCGSGMVIEGSKANNAMSGGCGSGCGGGCGSGMVNEGSKAANTMSGGCGSGCGGGCGALFNASTAAGEGLHNKSAGCGGGGCGSGCGGGGGCGSGMAIEGFKANHAKSGGCGSGCGGGGCGTGSMVAEGSNGGNAKSGGCGGGCGGGGGCGGGGCGGGCGAVFNA

SEQ ID NO: 69149 - protein, 142 aa, Zea Mays
MSSEEARASFSELVVGSPTRTEGETYSSGDMSSEEGAHVTCFTEDLHDVTLHFQIVRFSKQIYVWVGCNTAKFGHLYAAATTRPDNRVSVTSVLGGTSDNTGSSMARRLVLKTGLNIVLACNIPKDSPILEVLTGCCGEEAG

SEQ ID NO: 69150 - protein, 269 aa, Zea Mays
MDVDMVSFTGSTEVGRLIMKASAESNLKPVYLELGGKSPLIVFDDADLDMAVELAVGASFFNKGEACVAASRVYVQERVYDRFEERLAERMRSWVVGDPFSDPSADQGPQVDKAQYERVLSYIDHGKREGATLLTGGRPCGPEGKGYYIEPTVFTNVKEDMIIAKEEIFGPVMCLMKFKTVEEAIARANDTRYGLGAGVVTRDLDVANRVVRSVRAGVVWVNCYFAMGSDCPFGGRKMSGFGKDEGMHALDKYLAVKSVVTPLRASPWI

SEQ ID NO: 69151 - protein, 540 aa, Zea Mays
MDYDKSRRSNSKKRTHSNSDDGKRKRLNTRHDDTSMFSEPIETIYRILCPVKKIGSVLGRGGDIVKALREETKAKIRVADSIPGADERVIIIFNYQNEPEPTDEAAEEKNSDGLGNFKSHCFAQDALLKIHDKIVSDEIHDEVANDEKSESADDVTARILVQGNQVGCLLGKGGSIIQQLRSNTGAGIRVLPSENLPQCALKSDELVQISGAPSLVRKALYEISTRLHQHPRKENRPLEEIIDASTQRKRESPTLQHEYSMLPHLHSDHTPPIPLLDPYRSGPQYPVTETEEFSIRILCASELIGSVIGKSGANVRRVEQQTGARIKVQEIDKDASGERLIIISSNEIPAEPISPAIEALILLHDKVSAPSEKHHSSTRLVVPSSKVGCIIGEGGKVITDMRRRTGAEIRVYSKADKPKYLSFDDELVQAAGQIHGREDYREPTSATGFLSTIELRIPNSSLGSIVGAGGVNLAEIRQVSGARLRLHEAHAGSSESVVEIQGTLDQAKAAQSLLQGFISANSRQQQQPYSSRMPLYPSWG

SEQ ID NO: 69152 - protein, 366 aa, Zea Mays
MEPFVAAQGLVIVLQRSHARAYDDPLNKPNVQTTKNLRENKSTGAELPSLLPPAPPPSVPPPRYIATTGSTARNVSSLPDSSSPTRFGYPAGRRVLCPVPASAAGRMSLFRRLFYRRPPDGLVEISGNILVFDHCYSTDLLEEDELMPYIGGILKQLLGRHSIDSFMVFNFEGSKKDNQIASIFSYYDMSVMGYPRNYEGCPLLTMEMIHHFLRSSESWLSLSQDNFLLIHAEHGGWPILAFALAALLVYLKRYNDERKALEAVCKQAPDGLAEFFSPLDPVPSQLRYLKYVSKRHKSLESWPPVDRMLNLNCIIIRKVPNFDGQGGCRPIFRIYGLDPLAPNDRGTKLLFLTPKTSDFVQLYTQV

SEQ ID NO: 69153 - protein, 58 aa, Zea Mays
MPPFSLSFRCHHSILVNYSIPIDFCVSFQLKNILDFINLPRTSFTGNWLVIHINYFIS

SEQ ID NO: 69154 - protein, 54 aa, Zea Mays
MQEIVAKDILAEETEAGLNERPDLSFAFNPHSQMKSMYPCPFTIVPLLLSHPRQ

SEQ ID NO: 69155 - protein, 851 aa, Zea Mays
MHYASLLAGFTALHASLAAPLVLLSRICTSTWCRAPHVVLPIAGSTVWAVHELKLRAGTVVVAGRARAIVIGIGSNTAMGSIRDAMLRTEDEATPLKKKLDEFGTFLAKVIAGICILVWVVNIGHFRDPSHGGFVRGAIHYFKVAVALAVAAIPEGLPAVVTTCLALGTKRMARLNAIVRSLPSVETLGCTTVICSDKTGTLTTNMMSVSKVCVVRSVHQRPMTDEYSISGTTFAPDGFIYDADGLQLEFPPQSPCLLHLAMCSALCNESTLQYNPDKKSYEKIGESTEVALRVLVEKVGLPGFDSMPSSLNMLTKHERASYCNHYWENQFRKISVLEFSRDRKMMSVLCSRKHQEIMFSKGAPESIMARCTHILCNDDGSSVPLTMDIRNELEARFQSFAGKDTLRCLALALKRMPAGQQSICYGDEANLTFIGLVGMLDPPREEVWDAIHSCMSAGIRVIVVTGDNKSTAESLCRQIGAFEHLNDFSGYSYTASEFEGLPPLERTNALQRMVLFSRVEPSHKKMLVEALQAHNEVVAMTGDGVNDAPALKKADIGIAMGSGTAVAKSASDMVLADDNFATIVAAVAEGRAIYNNTKQFIRYMISSNIGEVVCIFVAAVLGMPDTLIPVQLLWVNLVTDGLPATAIGFNKPDGNIMSVKPRKVNEAVVSGWLFFRYLVIGAYVGLATIAGFVWWFVYSDNGPKLPYSELVNFDSCSTRQTSYSCSIFEDRHPSTVSMTVLVVVEMFNALNNLSENQSLLVIHPWSNLWLVGSIILTMLLHVAVLYIEPLSALFSVSPLSWVEWKIVLYLSFPVILIDEVLKFFSRRSPRGRRFPLRLWRREILPKESRDN

SEQ ID NO: 69156 - protein, 334 aa, Zea Mays
MDKYEAVRDIGSGNFGVARLMRNRETRELVAVKLIERGHRVILTPTHLAIVMEYAAGGELFDRIVDRGRFSEDETRYFFQQLICGVSYCHHMQICHRDLKLENVLLDGSPAPRLKICDFGYSKSSVLHSRPKSAVGTPAYIAPEVLSRREYDGKLADVWSCGVTLFVMLVGAYPFEDQDDPKNIRKTIQRIAAIQYNIPDNIRISDDCRQLISRIFVSNPLRRITMREIKSHPWFLKNLPRELTEAVQLSYFRRDNSVSAFSDQTTEEIMKIVKEARTLPKSSRSGYGYSEECSDEEEKEVESEPKEEEEEAECDKTVREVRESGELDMTSLHI

SEQ ID NO: 69157 - protein, 132 aa, Zea Mays
MKDPFEAAVEEQDSPPDSPAPPEEEPGAAGLADDAEDYDGGPPPRQPSAPASHAASAAAKAKGRVQREQQEDDDDDEDQMEVDLDKLPSSTGDPDKLAKMNAILSQFTQQQMNRYESFRRSGFQKSNMKRQE

SEQ ID NO: 69158 - protein, 448 aa, Zea Mays
MPERTATLLDLYSGCGGMSTGLCLGAALSGLKLETRWAVDLNSFACQSLKYNHPQTEVRNEKADEFLALLKEWAVLCEKYVHQDVDSNLAGSEDQEDADTLDKDEFVVQKLIGIRYDGTGRKKGVYFKVQWEGYGPEEDTWEPIDNLSDCPLKIREFVQEGRKRKILPLPGDVDVICGGPPCQGISGFNRFRNRDEPLKDEKNKQMVTFMDIVAYLKPKYVLMENVVDILKFADGYLGKYALSCLVAMKYQARLGMMVAGCYGLPQFRMRVFLWGALSSMVLPKYPLPTYDVVVRGGAPNAFSQCMVAYDETQRPSLKKALLLGDAFSDLPKVENHQPNDVMEYGGSPKTEFQRYIRLGRKDMLDWSFGEEAGPDEGKLLDHQPLRLNNDDYERVKQIPVKKGANFRDLKGVKVGANNVVEWDPEVERVYLSSGKPLMRWCKYCEIHG

SEQ ID NO: 69159 - protein, 1036 aa, Zea Mays
MASDSDVDEDELLQIALQEQAARDLSHQRPPAANKPVVNLVRPPAPNARGGNARAGGAAAKARQPSRGGDEDDDSEVELLSISSGDEDDNPRARGPPPPRGGGGGRAGARRAASRDDGDFDDEEPRSWKRVDEAELARRVREMREAKVAPNIQELDQKAAAAAAAAARKALTSVQTLPKGVEVLDPLGLGVIDNKSLRLITDASVSSPISREKSQGLDPNMRDIESKLRQIEEDPEGAGTAHLYSVTQKISGVANRAFEPLFERQAQAEKIRSVQGMLQRFRTLFNLPSAIRGNIRKGEYDLAVREYQKAKSIVLPSHVGILKRVLEEVEKVMQEFRGMLYKSMEDPHLDLAEIENIVRLLLELEPETDPVWHYLNIQNSRIHGLFEKCTQDHDSRMEVLQNKIREKVLSDSKWRQLQQDSNKSLEVDSTIGDSPRVDQLSTNFMAEEADSLRATYIRRLTSVLIQHVPAFWRLALSVFSGKFAKAASGNVVSDFDVNAKPTANKNDEKGGEVKYTNHTLDEVGSMVQATISAFDTKVQSTFRDFEECNILCPYMSDTIKEIAKACQTLEGKDSSPTAVKMLRTLHFEMTKLYILRLCSWMRATTKEISKDETWVTLSTLERNKSQYAISCLPLEFRDITVSAMDRIDTMILNLMSETAKSYDISQPLQEINESVRLAFLNSFLDFAGYLERFGGELTENRPNKENNYVSNGYINGTRETFVNTDGDLHKKLLVVLSNIGYCKAELSEELYSKYRHIWSPVRNNEERSSDMRDLRTSFSALEEKVLDQYTFAKSNLIRSAAQSYLLDSGIYWGAAPMVKGIRDATLDLLHILVAVHAEVYSGARPLLEKTMKILVEGLVDIFLSVFHENKTKDIRLLDANGFCQLMLELEYFETVLHTYFSPEAQQAMKSLQENLLEKACESVAEAMENPGHQRRPTRGSEDTASDDRQPSVSPDDLLVLAQQCSSDLLQGELERTRLNIACFMESTLQPTAAPAGPKPAAHSSYQAQHAPVQTSSPSFRRQQTGTSSPVVSRRRR

SEQ ID NO: 69160 - protein, 90 aa, Zea Mays
MRYPNLTNNHLELKNRIYIYTIFHSFLCMDRAIRFGSCPGVLVLVRTRTGCRSAAGAAPGRSKCQLHCTACDARRCHKAGGDRLRSAGCC

SEQ ID NO: 69161 - protein, 221 aa, Zea Mays
MEVGRAPRRRVSPAAAAAAVPSLLLFAVLFGAGATALYKHASFFDRDGDGVVSFSETYGAFRALGFGFGLSSVSAALINGALGSKCRPQNATSSKLDIYIEDIQKGKHGSDSGSYDAEGRFVPDKFEEIFAKHAKTVPDALTSDEIDQLLQANREPGDYSGWAGAEAEWKTLYSLGKDKDGLLRKDVARSVYDGTLFHMLAPNWKSPDEEEEQELSVIRES

SEQ ID NO: 69162 - protein, 801 aa, Zea Mays
MVLGLRTKTRKDSAFHVDFNILIQEISPWPPSESLKSLRSVVLFWENGERNSGKTSTVAPSIGSGSTAGKIEFNEFINLQAIFQKEGSSKSGKWQKNLLELNLYEPRREKLKGQHLGSATLDLAEHAMFHEDTSVPVPLSSKRSFKNNAQPMVYLRIQPLDGDNSSVSSRDALSQEASVDKDSKEFVSATVSEEYTEDTEFASFTDEEEATPYLYRSGVTALTGSNRSHESLKGKDIRLTNNEGTSSSLDSQHEATVSCMKVRNEEVEKFPIQVQKQNGHPENLSLSSDLPREQSPSLPPHNAFRSGRKMSFAYGMTESNQRQFGERTYSTLTTDRARNARFSMRVPDVNGSIINKKVDSQDIAITHENKASVDDGLQVQEPIRISNNRNDNKVRELELKIELLEAELREAAAAEIGLYSIIAEHGSSVNKVHTPARRLSRHFVHALKNCSRDKMGSAARNTTSGLVLVAKACGYDIARLSFWLSNCVVLRAIVTETSRQSGTVNSSNYGDYNSKTTYRKNSASMWESLNRKKGKLLSPEFDNWEDVDTFIAALKKIESWIFSRIVETLWWQTFTPHMQSADITGGLRSTPNPKKGYGKIPVVGNQQQATISMDIWKKAFKEASERLCPVRAAGHECGCLPMLTKLVMEQCIARLDVAMFNAILRESDDEIPTDPLSDPITDPKVLPIPSGKFSFGAGVQLKNAIGSWSRCLTDLFGMDMDDYQELDNEGGENGFGESVKPFYHLNALSDLLMLPKDVLMDTSSRKELCPTFSSSIIKNILDVFLPDEFCPDPIQGGISSH

SEQ ID NO: 69163 - protein, 513 aa, Zea Mays
MTERVSSMVVQETVSQILSGLIHSYEGKGDSNPNDNLERLEMAHIKLEAALETCSKWHITDLSLLRWRKKLKRAAQECDDTLYKYKKMILEDEQMEQEVRNSYFPRRIAHATKSFIFSAFGHNNYESSRSAVRRFEWYADGASEFLRFVELGGAPCCHMPFNSFAKHLFAGKELQHKIVRGNEYPLFLLWLMPFVTEEHGIEACLIFIKKDGNTLEDDFFFSVILQLSESTDIVGITMKCLQLFPHHFQPTVDTIKKELTQLTTQDFSWVPYVDLWHRKHWDNLHRFSTQWFRPDPLCCKQHDQHKLQYSNLGTVDASLDSIIEVNMQCQISLPKYNNHRTALSECKYSLRDYQKLKAGFLFTPHCPSENMLPADTSSTMVPIFRRGQHCEDTDIALEQLKEIMMSKAIDYFRQYTEATVYQILWKAIHGTAYIHFEKPAMEAPGARRSFRGARKRKLVQPMDQDVQHRTRMISHLLDLWAPHAPVRLRGLILDWIQKEKESQLAAPVHHCCT

SEQ ID NO: 69164 - protein, 194 aa, Zea Mays
MELDIQNFMQNPQLQEFEFQNFPTSYLRCAAHRVAQHYGLETIVADSLVEGSVSRIVARKTAESRPKAFQNGSADSRNKSGVPKTVDERIEEYNKARARIFNGSISADSDAASIMGTLSTGKDEPVNVDPSVDETKVSTMNSRSRVAVFKDTEKDRSDPDYDRNYKSLCSMTLVMCNLLACPQTSILCTLASLI

SEQ ID NO: 69165 - protein, 361 aa, Zea Mays
MYCKDDHVKQLPFSHASKHINTAVNQVRTSASIRPHRHGHACKQQSSPRNLELARHRNQERTIQAMEDDEEKPSQRITNKEEDEEDDDLVFPGFRFHPTDLELVGFYLKRKVEKKGFRIDIIREIDIYKHDPWDLPRGDKDDWYFFCLRGRKYRNSIRPNRVTGSGFWKATGIDKPIHDGAGERVVGLKKSLVYYRGSAGRGNKTDWMMHEFRLPSAELVELHDAGIWTICRIFKRNTSYTRRCQQQKQEYGSKRSQQQEQELQYYYDYYRYHHHHHQHHYFHSSEAVYAAAEHHRQPSFLLRGFHGSSSSSAETTTTSGFVGAHPLLPPSTTSTLGWSDAASLRDSGISTWDELGRILEI

SEQ ID NO: 69166 - protein, 219 aa, Zea Mays
MTSAHSKLYSDDVSLVVVVVDTNPFFWAAAALPFADFFAHLIHFVNSLLLLNHLNRVVVIAAGVSSCAYILDSSDASPSGGVAVSDTFDKASRKAEEFIAQDARATAGNGSVASANAASLLSGALSISLCYIQRIFRSGSRHPQPRILCLQGSPDGPEQYVAVMNSIFSAQRSMVPIDSCIVGTQDSAFLQQASYITGGVYLKPQELNGLFQYLAVFLP

SEQ ID NO: 69167 - protein, 333 aa, Zea Mays
MFPNMLPFGVAGQFNPLVIQPQAMTQQATRHARRVYVGGLPPSANEQTVAIYFNQVMAAIGGNTAGPGDAVLNVYINHDKKFAFVEMRSVEEASNAMALDGIMFEGAPVKVRRPTDYNPSLAAALGPSQPSPNLNLAAVGLTAGSNGGLEGPDRIFVGGLPYYFTEAQDLTVTDIACAALNGIKMGDKTLTVRRANQGASQPRPEQESILLQAQQQVQLQKLVYQVGALPTKVVCLTQVVTADELKDDEEYEDIMEDMRLEAGKYGNLVKVIIPRPDPSGQPVVGVGKVFLEYADIDGAAKAKTALHGRKFGGNPVVAVCYAEDKFANGEYDG

SEQ ID NO: 69168 - protein, 73 aa, Zea Mays
MLRGDLDGDLCFITWDDKLIPKKVDPMDYCNEVTHNGPCCYTRDAVSCLLFLGFRRRENSFRLPAKHGQRPAW

SEQ ID NO: 69169 - protein, 517 aa, Zea Mays
MDAESPRDAYGFAVRPQHLQRFREYAKIYKEEEEERAHRWRDFLDRLADAANVPTTPSVSPYASTGDPASGAGQAQENSGIGIHCDDEEEGSENAEHNNNLESPKESDASAESREANGKSEDLKDVTNLDKLQEKTGSSSSTEAIKALEGLMETNGDFEELKDLNGSSEELEEENNGNMEKLVELFLDKGLLDELKPIKVESQRRVRAALSIIDKMMSSRVVKGGNGANGIHGNDGAQLTSIEEEGRTAEASDDGDPAEVESCVAEKVELGQETTHDSTGTALDGGNDGSYFPWREELESLVRGGVPMALRGEIWQAFVGVGARRIPGYYNKLLDDRTETLDEKDLVDPVVNEQGSAPRKVTQPEKWKGQIEKDLPRTFPGHPALDEDGRNALRRLLTAYARHNPSVGYCQAMNFFAGLFLLFMPEENAFWALVGVIDDYFDGYYTEEMIESQVDQLVLEEVVRERFPKLAKHMEFLGVQVGWITGPWFLSIFINMLPWESGQYFAFGMSSFLKEIA

SEQ ID NO: 69170 - protein, 134 aa, Zea Mays
MVRMHSARPGRRPAHGQTETARRVSSLAGRVPRVDRRPEGNMRQGRRRRRRRCRCDSVEPPSYDSGSGDQVRPCKLLQVQCKLASCRCFRDDGGRVDPTSRTVTGRWDWEVGALYCSCRSTGARGNLGDSIYFI

SEQ ID NO: 69171 - protein, 78 aa, Zea Mays
MPIKRSRSATPAGKRICKNLQEHAANREEDLHERCQPGDRHHRRQPSIVVTQIYAVRIRVIRRASWYLESQVPGKLCP

SEQ ID NO: 69172 - protein, 203 aa, Zea Mays
MRVVHPYKLDLYRTLSPLITYIRIHAHIFHEGYPYNLDFDYGALAQLQHFSINNLGDPFIESNYGVHSRQFEVGVLDWFASLWELEKDEYWGYITNCGTEGNLHGILVGREVFPKGILYASRESHYSVFKAARMYRMDCVKVDTLMSGEIDCADFQRKLLQNRDKPAIINVNIGTTVKGAVDDLDLVIKTLEENGFKGASSDI

SEQ ID NO: 69173 - protein, 345 aa, Zea Mays
MLKFELMYAPTLENGSELQASSVTSSAAVHEFRIPHRALLGLHSYCPVHFDAFHSVLVDLTLHIVYLKAGATKPSLKVPDQGLGPTSYHIVKALLTSRKLLLEELKKISGAIGKTVEELDVADLNLGRYESFNPSKSGLPNSSKVFPATGKGVGQLTGVLHDFLEKNNDMVNGTDDSMLVNKTKILEYLHDAWAIDRKAEWSIWTVHSKIEIPHRYLRSMNDESSHRHSLLRVSGSRKFHDDPAQNSASRAELHRKSIAQMKNNMSWLFHSIVPARIWLRMLLNKRILLCYLNYKESLWYPKVVLVKKVGASCELSFLCMVFRATIWIYVLLETNGFYWTLELIA

SEQ ID NO: 69174 - protein, 56 aa, Zea Mays
MDPQNHEHNPRITTNLPSLHPSHWRRCSDRSLAVTGISPSPLAATVVRTAQFLSRR

SEQ ID NO: 69175 - protein, 76 aa, Zea Mays
MVGVLKQMMTNFLNCMKVNQDMLIGFSKRLDLLSGISQILLLQKIGPTGTRTQVARFKVWSDNHYTMEPFMCVLPR

SEQ ID NO: 69176 - protein, 259 aa, Zea Mays
MTVYHPAPTRGDWDCEEERREGEVDCTAHTTRPRSSVPFRAPPQHETPKPYPLASPSSSSPPPIRAPAECRREAVGGSSSATRRRRPRCCTCGTFRGSARKRSSSSSASLSAASSTPRAASAPTTTRPLSSSLTLIRQEIINNKSPGETAGNVLLVTIEGVQSSDVTIDVIHMVFSAFGYVHKIATFEKAAGFQALIQYTDAATASAAKESLDGRSIPSYLLPEHVTSCCLRISFSAHKDLNIKFQSKPQQVAGQEVYL

SEQ ID NO: 69177 - protein, 63 aa, Zea Mays
MELSMNATCMSPALLAFPEHFPTESYISSEMVAHVQLPLRHGPAMVFLPLSPAYVHHKRGCSS

SEQ ID NO: 69178 - protein, 652 aa, Zea Mays
MVLDIKVKLQGLWLRLLRLGATEDPLSSFEYGTILALIESDAEGIGGSGFVECIREHIHSGWQCRLTDEQFIAVKELLKMAITLANSRNDLATIRDALEVSAEMYRKDPNNVQDYVQRHLLSLSVWEELRFWDGYFEYLMENCSNKSANYVTLVTAQLILMATHMAGLGLPDIDSWNMIEKIAERNNLGYKQLIKLRALLTHLQQLRIGYWGVATGKSQPLQSYGMASPHAIDVIDESQQPAEASGLGRSWVQSMFSRDRSLRASSFNRASDGNAVAATGKTEISAAQKKTQTNMRTLRGHTGAITALHCVTRKEVWDLVGDREDAGFFISGSTDCTVKIWDPSLRGSELRATLKGHTRAIRTISSDRGKIVSGADDQSVIVWDKQTFKLLEELKGHEAPVSSVRMLSGERVLIASHDGTVKMWDVRTDTCVVTVGRCQSAVLCMEYDDSTGILAAAGRDITAHVWDIRSSKQMFKLQGHTKWIRSMRMTGETIITGSDDWTARVWSLNRGTCDAVLACHAGPVLCVEYSPSDKGIITGSADGLIRFWENEGGIKCVKNLTLHTASVLSISASDHWLAIGAADNSMSLFHRPQERFGGFSNAGSKVAGWQLYRTPQKTAAVVRCIASDLDRKRICSGGRNGLLRLWDATTSI

SEQ ID NO: 69179 - protein, 664 aa, Zea Mays
MSRAHCGFSSADRISEVVLLISGLDEVDEAAIEKEDNGKMEDIDCNHDIRIHEDLGHVCRVCGMIVRRADSIIDYQWKKASRRRTNGYGGHSKDADEIDCGTVKLSEDFIVADIAIHPRHARIMKPHQLEGFNFLVKNLIGDKPGGCILAHAPGTGKTFMLISFIQSFMARYPSARPLVVLPKGILGIWKTEIKRWQVQDIPVYDFYSVKAEKRVEQLQILKSWEDKMSILFLGYKQFSTIVTDDGGSNVTAACRDRLLKVPNLLILDEGHTPRNRETNVLESLNRVETPRKVVLSGTLFQNHVEEVFNILNLVRPKFLRMESSRPTARRIMSQVEIVGRSSKGLADGAFTKAVEETLLNDENFKRKAHVIRGLRELTKDVLHYYKGDILDELPGLVDFSVFLKLTPKQKDIIYKLEAHDRFKRNAVGSALYIHPCLSELSEVNAEHRANTFRDDLVDSLVDSITVRDGVKANFFMNILSLANSAGEKVLAFSQYISPMIFFERLLVKKKGWHVGKEIFMISGDTSQEDRELATDHFNNSADAKIMFGSIKACGEGISLVGASRVVILDVHLNPSVTRQAIGRAFRPGQQKKVFVYRLVAADSDEVKVHETAFKKEVIPKLWFEWSEHCTTEDFKLGQIDIDDSGDELLDTKAIRKDIKALYRR

SEQ ID NO: 69180 - protein, 177 aa, Zea Mays
MLHLIEACILRKLIDTSAYLWPGYVVPSGTLKDTALPQESPWLNFMKVSRLSGPLIDALVASPASRCFKLCKVRSVQFGQKGISYLNTYDGRTIRYPDLLIKANDTIKIDLETNKIMDFFKFDVSNVFMVTGGRNTRRVGVIKNWEKHKASFEVIDVLLGAFCMLCLVFSYLLYKKT

SEQ ID NO: 69181 - protein, 879 aa, Zea Mays
MGPAKGSRTINKTIVKGYEDQQQHDDPSSSSKAKQKKRKISDLDPKWSKDELTRFYEAYRQHGKDWKKISIAIGGKSSDMVRSLYSAHRTFLSLPEHQATAMGFIALVTGHHNASEKTTSHRGYDHIARASGKARKHGEQQKSIDGPDLHNCHEGEITGFSASFKKRYYGELVRNSRNHAVQRRTPLIPVIAPADRSTIDEPTPGIENVINFNSTKRKYEAANHGCAVAPTNKYSSDRVSGFAETCKADQGHSYLDTMEIGDIAMCQQHFKKTRIQQTVEESQTGIVEHETTMASKEGNKLVSSVNNNQILIDSISEDDMLVLDVLNSLVNAPSKMSELEINIPSGSLGKTDSVLREEGHPTIDLSKQGKPVRKSSASKTRKKKHKKILGAEVPAEAQKKCDDNLVLPETLRVGITDDSSLCTDSGRARTPEASEDISAEVPNTQTEAKPEFIMSGRTRLKSQMHCKTKPMSCNEGSDNFQAKKLLHCLSSEPLRRWCTYEWFYSAVDYPWFSNNEFVHYLDHAKLSHLSRLTRSEWSAIRSSLGKPRRFSNHFLAVEKEKLEDYREKVRKIYAQLNDGSRDSLPADLARPFSIGQQVIVRHPSSRELCDGKVVMMGPDCYKVHFDDPDLGVDTVKDTDCMPVNWLHNRPDNMRRNYLSNDVYNILEMDHIPDLTPSENRNHAINGTTVFEELKSLRLTSDRQPKAESIIHSERPPYRSTSDGPTSSSGFSCPDNNAGHNGELESYVAAFFENSLSQARQMVDEAIQANSGGSDDEKVCMLNQVTGCLGSDSRGVQLPSDLISNCIATVISIKRLSDSRHPFGNVAGVLEHALSMLRPSCPQNLGVYTEIKRDLCTIANQIFALVPTASGNCSPPVSPM

SEQ ID NO: 69182 - protein, 317 aa, Zea Mays
MASGSGRARGGGIRIQEPGSRHRDESNAGAAAAAAEPPPPSPSTDGLQERPHGPLGAESGSPSAAAAALKGKGVLAPSPLPSPTRSEETNSLVSSDIVSDEEAEELRSANTLADGDRRFGVSWKSPLVEAMMEVPKVTRHIDSKTAFDNLSMEQQWALAEEIEMQQRQQAQQRKCLWITFKGGMSNMFLDWIGRQMHNFNSDSTVIIPHVNHQTIPMTGIIEHYNLMETDAGRGVIFHSNVLNLRRAYSEFRPVHGDGDCFYRSFMFSYLEQVLDRQDTHEEHRLLAAVEGVARHHAHLEWNSEFSLRHKDMHIVSH

SEQ ID NO: 69183 - protein, 67 aa, Zea Mays
MQHDQQEILYGSKPNASASKRVGYLNPILIFEESHTFRIGKDNDEIRGKTDEEVEKRIKDMKKDFEA

SEQ ID NO: 69184 - protein, 79 aa, Zea Mays
MHEGLAARSTARPAFNSRVTTTTHVRKVSRGTTPVRTYERSAAVLSGGRSPGRACQRPRAVTGRGTGTGTGTGSPLSGY

SEQ ID NO: 69185 - protein, 771 aa, Zea Mays
MQQHENGTGPVIDSSLFSSYTPASSIELDEPGQMPHLQFPVPSDQGATTEGLGVDYLTFDEVYSDGLSLNDIGAAGTHGKSYLQFSSATGDLSATENSLPQQNDGSLEEAAIGYPFLKTQSSNLSDILKDSFKKTDSFTRWMSKELPEVEDSQIHSSSGGFWSTGEANDIIEASSHEPLDQFTVSPMLSQEQLFSIVDFAPNWTYVGSKTKILVAGNILNDSQITERCKWSCMFGEVEVPAKILADGTLICYSPQHKLGRVPFYITCSNRLACSEVREFEFRPTVSQYMDAPSPHGETNKVYFQIRLDKLLSLEPDEYQATVSNPSLEMIDLSKKISSLMASNDEWSNLLKLAVDNEPSTADHHDQFVEKLIKEKLHVWLLNKVGMGGKGPSVLDDEGQGVLHLAAALGYDWAIRPTLAAGVNINFRDVHGWTALHWAAICGRERTVVALIALGAAPGALTDPTPDFPGSTPADIASANGQKGISGFLAESSLTSHLQALNLKEANMAQISGLPGIGDVTERDSLHPPSGDSLGPVRNAAQAAARIYQVFRVQSFQRKQAAQSEDDKGGMSDERALSLLSVKPPKSGQLDPLHSAATRIQNKFRGWKGRKEFLLIRQRIVKIQAHVRGQQVRKHYRKIVWSVGIVEKVILRWRRRGAGLRGFRSTEGSVESSNGGTSSSSIQDKPSGDDYDFLQEGRKQTEERLQKALARVKSMAQYPEARDQYHRILTVVSKMQESQAMEEKMLEESAGMDFMSEFKELWDDDTPIPGYI

SEQ ID NO: 69186 - protein, 184 aa, Zea Mays
MRQKSKEFPETKPLDYHRYLVVSLGTGLPEQDIKFDACRVAKWGIFGWLGRRENTVPLLQMFMHASSDMTDSYVADLFKAIGCSDQLLLRVQDRNIPIAAVAADLSTEKNLRGLVKIAENLLHKPLGEDDYKTDDRVETTPRDGRAILTYAGMLARFAKLLSDERKLRLQNMGHCMPVIANREA

SEQ ID NO: 69187 - protein, 94 aa, Zea Mays
MLSWSIFRRGITTPSFHVATAVAASAPIKSLANTVSPFHNTENNERPQELEHPIHPHRQPSLLPVACRVSSVHTIRPRRERLDKGVVVGREARA

SEQ ID NO: 69188 - protein, 284 aa, Zea Mays
MQSKPRDKIILATKVAGYSERSTFLRDNAKVVRVDAANIKESIEKSLKRLSTDYIDLLQIHWPDRYVALFGEFSYNPTKWRPSIPFEEQLKALQELVDEGKVRYIGVSNETSYGVMEFVHAAKAQGLPKIVSIQNSYSLLVRCRFEVDLVEVCHPNNCNVGLLAYSPLAGGVLTGKYLDANADISKSRLNLFPGYMARYNDSLAKEATLEYVKLAKKHGLTPVQLALGFVRDRPFTASSIIGATTMEQVKENIDAFTSTPRPLPQEVLDGIEDLFKRYKDPAIL

SEQ ID NO: 69189 - protein, 161 aa, Zea Mays
MPNNGLPTVLNFSIRYNLCRRATLLTWCCYDSIRYWFHPHASDCRYPIYRIPTGPTLKDLDACFLTFHCLATPCKDCDPPTPACPGFGGINRGTTAAGKLSLPIFGLAPYKLRASIWTSDKTQERDLVTSLMQEADSWLRRIQVDHPDFRFFVSHFSTTWR

SEQ ID NO: 69190 - protein, 540 aa, Zea Mays
MGEPKMCQIICKAKIDDKQAKELKEKIEDEYRVNMILDNLPLVVPLARQDRGATVYQAGYHVGVKGQYAGNNDKKSFIHNHLAFLVKYHKDETTDLSRIVGFEVKPFSINHQFEGPWNDKNTRLITCDPHASKLLVNSDTPQEVEAGKEIIFTYDESDIKWASRWDTYLLMIDDQIHWFSIVNSLMIVLFLSGMVAMIMLRTLYRDISRYNQLETEEETQEETGWKLVHGDVFRPPANSDLLCVCVGTGVQFFGMLLVTMIFAVLGFLSPSNRGGLMTAMLLTWVLMGLFAGYASSRLYKMLKGSEWKSITLRTAFLFPGIAFGIFFVLNALIWGEKSSGAVPFTTMFALVLLWFGISVPLVFVGSYLGFKQPAIEAPVKTNKIPRQVPEQAWYMNPAFTILIGGILPFGAVFIELFFILTSIWLHQFYYIFGFLFLVFIILIVTCAEITIVLCYFQLCSEDYLWWWRSFLTSGSSAIYLFLYAGFYFFTKLQITKVVSGMLYFGYMLLASFAFCVLTGTIGFYACFCFTRLIYSSVKID

SEQ ID NO: 69191 - protein, 488 aa, Zea Mays
MPTFPRAGRWSTSSTWPRKTAGAASTALAAVVFAVLDVADVILCFAYALLDGVLEDSPVRCYCHRSYDDGIREAAAGASVDGGGHEEVSDTLYACGRRSTVRDALLGLVRRVVPRTRRTRAPPDETVAPCKWRSPRWSDCACKSCVAWRCGEEGGGRLHVVVKEPGPKDAAAAGTTTRAPDPENAIFVHGFASSSSFWSETVFRESSCILDGCRLFAVDLLGFGRSPKPANCMYRVRDHVEAIERTLILAGDGESQSLMSSFHLVSHSMGCTIALALAAKHPTRVKSITLVAPRASQVALNRLAEKKLWPPLLFGSAVMSWVRDLTKHTHHSAWHTMHNVICGGAALQDANLEAVAAAGIPVQVLHGADDQVVPVECGRHVKAKIPRAKLRVMERRDHSTVVLGRERGFAEELKAFWCASRSPVHVQDAEQQETLDISSPSKDSKIIQHDNTSVPTILARRLRIDLCISSLQQELRAIMQQVLEFPFA

SEQ ID NO: 69192 - protein, 176 aa, Zea Mays
MAAAAAPVSLVFLCTRGQQQLVLVDATKPPLPLRSRAFSVRAAQQQQQQQHRARPRPPRRNKPPGPARRPPRVPLDQDEYDGGYDDREEGRFAGGTRAAAMPKPPAGFVLDDQGRCIAAASKRIVTIIDDTNNRPLECIIRRVFRSSQDHDCMLLCPVDMPVQVLKSTNFSGWVAV

SEQ ID NO: 69193 - protein, 118 aa, Zea Mays
MASQPLERRAMREAGFTEQRIPSASNGGRITGHCTPGPPRLRRSFWQTTFFVFWLVLHSYSFATAAHLSNQQRLATTIINRLCSRFEPLGTGPLDVRYIPHVTCSCHFVHTSVFWLSL

SEQ ID NO: 69194 - protein, 392 aa, Zea Mays
MIATHKDYEGFTDEELDKFESAFGWGSTFLSDPQVLCMDSSDPQNPPRIGRQNYEPLTAQEFFSLRHNWQQLLDGKKTYLRPPKNNRVAKHSYANCTFVTPEPLEKALQCQEPLSDFGRKYAENSIVQQKFKILSEHYAHVRQMRMDGSSFYRAFLFSYLENLGKMQASHAEVTRLMECVARSREKFCRLHWNDAYFSNPEAFFSSVVSEFEQLVNSVANGLNADELYKRSLHEITSSRILCLFRLLTEVHIRTHHADYPEFSQETEALMFCLASVRPFEAGANILQMSALSSALGIPLHLACTDVTTSDDEIVTVKCFDLFPQSESGASTTSGATSSIRSYSLSSTTDKHPEQGRDDNNSTMPAGNLFSSDRMPLVILLSRKGQYGILYRK

SEQ ID NO: 69195 - protein, 63 aa, Zea Mays
MKAWCDKAMDKAIRAGRILMKRPGVVVPDDIVVDVLVASGTLSNPSASGDPVDKVPREDAHAQ

SEQ ID NO: 69196 - protein, 1025 aa, Zea Mays
MSQWTGSALNSDKREHEAKSVSSASDEDSWVDVKIPESPAGNKTPESQERSVIRTCRENTLPHYEATAEMTDVNPCVSLTVRLLSLQSKTSVHIEEIYIFADPVEPTDDVSVRGPVNMGGSSLLAMLVPGLMQMSKSRNLKIDDSYFSDGSRNQESSKCESFTQEAGPCSTNDSKHTSAGIENGMNSTVGVSASDDKSSQGEFHFKDPDSLPLPVQTLESTQAPSVKNQHELNTGYLANPIMSENLTPSNHIERKLDTLLSKVENMELFCSRFEDSMIKPLGSIEARLQRLEEQFSSFAVDIQSLRDYSAFRSAPDGMPNTKSSQEEAHNDANDRSTSTSDRKPGLVVRAPDFVSDDSCGCNVITNGSRVNCHGPNVVPRILVKAPDFISQPELTDENLHDGHALSSEKECKTSPGLVVKVPELPDDDDDDGVEDKKQAEVCGDGDDHTRSDDTLRKSTAGNTKSKKSVSINGALASALEALLTSTIGTSYSKPTICATSNLSAENINGFFSCSPCPEKTGEMSTKDGSAVQILGTSGDPNLVGAFISSQEIDTAPHNSLSKEMLDSKVEINEQNCDINTENVAFVAITEPLDVPSQADTVEESINDGSWVNRQNYGSNLNAMPYAMNVEPLDPPKPPTVSEPVDSGVQVNEDRPSISLVEFLAARNASSCKNGTSEVCLGNVAAEKLSFERTSAGAGKNSKNISQLLVKKALEVDADKIFFLFSVPIGPKFEGSSSPTPRTSGHNINNTEEAVSDKECGVKDTKNGFRPSLGMDSIFSQYHATDSKKNLSENSSSDRILDESFSKQNGEQSRSSLSSMVSFSGASATEPVVPGSGTSENYVEDLTGVRDRPVATLNSGEELQKVCDLLYEFKDEMLRASVAKCTNKSSPSLEALLAESSDSEAQISDLEGTDSGAGIGSGRLFSTLSSSDDDDASAADEPLVDVADLTTPPERYTSVPSDEPLVDIADLTNPSGIDASSVNEPPADVVDLLHTSNEPLVSLDGLPNHPEMCFGGSSGEHTDSLI

SEQ ID NO: 69197 - protein, 716 aa, Zea Mays
MQGLAVSCQLPPAAAAARWRPRASSSNREAVLQCWKYELSQDHYLGGPLRIGQSQGSLHRHRSTNFLRPAAAAISVEQDEVNTYLPKGDMWSVHKFGGTCMGTPKRIQCVANIVLGDSSERKLIIVSAMSKVTDMMYNLVQKAQSRDDSYAIALAEVFEKHMTAAKDLLDGEDLARFLSQLHSDVSNLRAMLRAIYIAGHATESFSDFVVGHGELWSAQMLSYAIKKSGAPCSWMDTREVLVVTPSGCNQVDPDYLECEKRLQKWFSRQPAEIIVATGFIASTAGNIPTTLKRDGSDFSAAIVGSLVRARQVTIWTDVDGVFSADPRKVSEAVILSTLSYQEAWEMSYFGANVLHPRTIIPVMKDNIPIVIRNMFNLSAPGTMICKQPANENGDLDACVKSFATVDNLALVNVEGTGMAGVPGTASAIFSAVKDVGANVIMISQASSEHSVCFAVPEKEVAVVSAELHDRFREALAAGRLSKVEVINGCSILAAVGLRMASTPGVSAILFDALAKANINVRAIAQGCSEYNITVVLKQQDCVRALRAAHSRFFLSKTTLAVGIIGPGLIGGALLNQLKNQTAVLKENMNIDLRVIGITGSSTMLLSDTGIDLTQWKQLLQKEAEPADIGSFVHHLSDNHVFPNKVLVDCTADTSVASHYYDWLKKGIHVITPNKKANSGPLDQQLLVLASQSSAPCEVFWRRVTRYCVLRAFSVEL

SEQ ID NO: 69198 - protein, 454 aa, Zea Mays
MRAWEMHPLCCLAGEWPASGGGLAPGDRSPPAEDAGAAPAVAGVLYKWTNIGKGWRPRWFAIRGGVLAYSKIRRRVAAEPRPEAAGGVRLIGVARGAAGAAERPIGFVPLKISSFSESKSDDKRFYIITPTKTLQLRTGCANDRATWIEALVTARSEYSFNGDLSGDQNDASFSTEKLRNRLNAEGVGEAVIKDCEQIIHSEFSQYQTQMKQRCEEYLSFIGTLPQDVEVVNSVDSTVPEKPRLELFKHDCSSSGKCSEYSNTESSDDVGKQEISELSDGDEFHFYDTRQSFSEFASSPADPRKGCLNNGNEDHKSVESLTVDKAEKYMLSHSKRRLQLPEPIEKEKGVSLWSMIKDNVGKDLTRVCLPVYFNEPLSSLQKCFEELEYSYLLDRAYECGLRGNGLMRILYVAAFAVSGYASTDSRPCKPFNPLLGETYEADYPEKGIRFFSEKA

SEQ ID NO: 69199 - protein, 62 aa, Zea Mays
MRYDTPSRVSNSGRRSSHVKARVRRAAADDDDDHRSSDPSRASAATASSTRALPLKRSRKQL

SEQ ID NO: 69200 - protein, 226 aa, Zea Mays
MLPAFSTCCEELVSRWAAESLGSDGSCELDVWPELQNLTGDIISRTVFSSSYSEGRRIFQLQVEQASLVMTNIRKIMIPGYMYLPTANNRKMRRNNREVESILREIIGKRIQAMEQGEGTKDDLVGLLLETNMRDDMGMTIEDVIEECKVFYFVGMETTLVLLMWTMVVLSMHPEWQDRAREEVTALFGRDDKPEYDGLSRLKVIAKTGLLSKLRFQWHIPSYIGH

SEQ ID NO: 69201 - protein, 80 aa, Zea Mays
MAAATHTTLLRHNTTTARNRGASSLQGRSNTRNDGRVAHELGMGKLVSTVSDGDTNSARCGLAGEGTSRQRAERHGPGIG

SEQ ID NO: 69202 - protein, 82 aa, Zea Mays
MGRSVEHMVLAVWFVRVDNFSVGRCREDGGRGEAGAEELLGGASQEPHRRCHDAGLPRCQSRQGATCRSGQGGCPKMKEHLS

SEQ ID NO: 69203 - protein, 226 aa, Zea Mays
MVEFMKNLARMDVDMSAEERHLFSVGFKNTIGAKRASWRIICSHEQKVAADRQTGVMIDAYKKKVEEELRKVCNEVLSVIAIHCLPLASTGENIVFFYKMKGDYYRYLAEFSTGTEKKAASDQSLMAYQHAMVVASSELSPAHQIRLGLALNLSVFFYEIMNSHERACQVAKQAFDEALTEINSGEGVYKDSTLMMQLLKDNLALWTSELTGGEASKGNGDVDMEG

SEQ ID NO: 69204 - protein, 181 aa, Zea Mays
MDYSGTKESPPSGAWWSRETVAVVTGANRGIGHALAARLAEHGLTVVLTARDGERGEAAAAPLLARGLAVVFRRLDVSDAASVAEFAAWLRDAVGGLDILVNNAAVSFNEIDTNSVEHAETVLRTNFYGAKMLTEALLPLFRQSSATSRILNISSQLGLLNVSLFTVCSVSSDEVATLSYY

SEQ ID NO: 69205 - protein, 247 aa, Zea Mays
MLGIFSQNEHILIIHATTKRREDFTAYADVCFREFGDRVSHWTTLDEVNVAAIGSYDNGQIAPGRCSDPFGTKKCTVGNSSVEPYIAAHNMLLAHASATRLYREKYQAVQKGVVGINIYTMWSYPLTNSTADLEATQRFLDFYSGWILEPLVFGDYPSVMKKNVGSRLPSFSKVQSEAIRGTLDFIGINHYYSFYVNDRPLEKGIRDFSLDIAADYRGKTVCHSIHDYPFIACNSLDTFPGTSDSFI

SEQ ID NO: 69206 - protein, 364 aa, Zea Mays
MDVPLPLLLGSLAVSVMVWCLVLRRGGDGKGKRPLPPGPRGWPVLGNLPQVGAKPHHTMCALAREYGPLFRLRFGSAEVVVAASARVAAQFLRAHDANFSNRPPNSGAEHVAYNYRDLVFAPYGSRWRALRKLCALHLFSAKALDDLRGVREGEVALMVRELARPRRGEGGRAAAVALGQVANVCATNTLARATVGRRVFAVDGGEGAREFKEMVVELMQLAGVFNVGDFVPALAWLDPQGVVGRMKRLHRRYDHMMNGIIRERKAAEEGKDLLSVLLARMRDQQQQPLAEGEDNRINETDVKALLLPLPTAPTPALQLPPRRMLPNALYNPGERSRKASDARQEGHPARPRQWRHSAPTNPQH

SEQ ID NO: 69207 - protein, 250 aa, Zea Mays
MVFEYMDHDLTGLADRPGMRFIVPQIKCYMKQLLTGLHYCHVNQVLHRDIKGSNLLIDNEGNLKLADFGLARSFSSDHNGNLTNRVITLCCYRKVLIVFLDCSCRPPELLLGSTKYNLAVDMWSVGCIFAELLNGKPILPGKNEPEQLTKIFELCGTPDDTIWPGVTKMPWYNNFKPHRPLKIRVKDFFKHFDRHALDLLEKMLTLDPSQRISAKDALDAEYFWTSRAMSAAVNTMRIRAPRWRRLCRRP

SEQ ID NO: 69208 - protein, 242 aa, Zea Mays
MNSGSFMTSQQGLFSSAGTRFSSFPAPRPEPSWSGVIKSEDSSYYTHHPVLSNRPHVAGTSTSPAYSKEGRRFPFLQDGDQVSFSASGAGTLEVSTVCQPLLKTTAAVAPPPPESSKMLAPVLDSDCALSLLSSPANSSSVDVSRMVQPAERIPMAQPLVPGLQHHQFGGSPVPDWFAGSGAVPAAGTGGFACPHSVESEQFNTVLVPSSDGGHEMNYHGIFHVGGEGSSDGTSPSLPFSWQ

SEQ ID NO: 69209 - protein, 512 aa, Zea Mays
MAGSSAEQLLSRIAAGDGHGENSSYFDGWKAYDMNPFDLRHNRDGVIQMGLAENQLSLDLIEQWSVDHPEASICTAQGAPQFRRIANFQDYHGLPEFREAMAKFMGQVRGGKVTFDPDRVVMCGGATGAQDTLAFCLADPGDAYLVPTPYYPASEAAAHRMPQLEQLHPHQGGARVGLRRRAEAGRPRQGHPHHQPLQPAGHHHGPRHAGDARRVRHRAPRPPHLRRDLRGLRLRQAGLREHRRGHRARRRPGLQQGPRPHRVQPLQGLRPPGLPRRHRLLLQRRRGGLRAQDVQLRPRLVADAALPGDDARRRGVHGTLPRGERAAAGGAPRPLRRGPPRGRHRVPAGQRGPLLVDGPAGHAPGEDARRGARAVAGHRTQGEAQRVARHVVPLQRARLVPRLLRQHGRRHHGGRARPDPPLRAPAPAQQGQGRALGGHAAPSPQLAAPGSNHRFASRHLQPLGVAVAAVPDGPRQLGSHRAFGKTGCRLCPHMTANKWTKKKTRLIKGVRS

SEQ ID NO: 69210 - protein, 342 aa, Zea Mays
MVRLGLWGEGTSFQTFPQFLGALEKGGVGALELVAMDMKARGMYVCRTLSYKGADFYIVEAPLEERMMNMYRRAAEFWAELRLELLSASELFADGNSNQIWRLYWASHQRFFRHMCMSAKVPAVVRLAKEALAENKCVVIGLQSTGEARTEEAVTKYGVEMEDFVSGPRELLLKLVEENYPLPPKPDSFQQGEETVTEIQRKRALDVSFKGRVRKVAKVVDVSDDDTDDYSPSESDHESTESDEEFHMCQICNTEEEQSLLLHCSGCSRHVHPHCLTPPWTGTITDDWACYTCKIVEDEEKKQDAHVADCLKRISLLMSMKRIPCSGGKDVVISCMELPEKD

SEQ ID NO: 69211 - protein, 394 aa, Zea Mays
MAASLVTPEAMAFIVRHGTGIVCVSMKEDDLERLSLPLMVTTKENEEKLCTAFTVTVDAKEGTTTGVSAKDRAKTVMTLASPDSRPEDFNRPGHIFPLKYREGGVLKRAGHTEASVDLAMLAGLPPVAVLCEIVDDADGSMARLPKLRVFAERENLKIISIADLIRYRRKRDRLVERASVARLPSQWGNGHGYCYRSAIDGIEHLAMVKGDIGDGQDILVRVHSECLTGDIFRSARCDCGDQLAMAIEMIEKAGRGVIVYLRGHEGRGIGLGHKLRAYNLQDDGRDTVEANEELGLPVDSREYGIGAQILRDLGVRSMKLMTNSPAKYSGLKGYGLSIAGRVPLVTPITSENPQILCPIREHGRATEDGEELVKQGYIPDLGILVFSCGRCTSC

SEQ ID NO: 69212 - protein, 431 aa, Zea Mays
MAIECLVLGAGQEVGKSCVVVTIGGKRVMFDCGMHMGYHDDRHYPDFARALAAWGAPDFTTAISCVVITHFHMDHIGALPYFTEVCGYHGPIYMTYPTKALAPFMLEDYRKVTMGQRGEEKQYSYEDILRCMKKVTPMDLKQTVQVDKDLVIRAYYAGHVIGAAMIYAKVGDAAMVYTGDYNMTPDRHLGAAQIDRLKLDVLITESTYAKSIRDSKPAREREFLKAVHKCVSGGGKVLIPTFALGRAQELCMLLDDYWERMGLKVPIYFSAGLTIQANVYYKMLIGWTSQKIKDSHTVHNPFDFKHVCHFERSFINNPGPCVLFATPGMITGGFSLEAFKKWAPSEKNLVTLPGYCVSGTIGHKLMCGKPTRVDYEDTHIDVRCQAISIDWSESVLTIYSARSIPSGEDTRGAGVGLAPPTTQLRYTTNVF

SEQ ID NO: 69213 - protein, 1284 aa, Zea Mays
MSSGTVAASDPGGGETKLVAGDDVTISEAAGDMPAFAADLKVEEKATLTMDVAHERGDMAVSDPLYATESAGMVGTEGHGDEPVEDVDAVNGEDGGEEGTQEAGAGGLLTETERKPVLVVDVPAAAGSAAPEHAEAGEQFPDSGNSPDSNLEAASLGNVDQGARYRLPPLDKGRFQVADLVWGKVKSHPWWPGEIFDPTDASELALKHRKKGSHLVAYFGDSTFAWCDESQLKPFVTNYSQMEKQSSSDGFVGSVNNALEELSRRVLSGLSCSCLAEELADNGMSYTVDNAGLKDGVTCSAVNRPEILNCFSPENLLNYIKELALFPGQGGDLLELVIACSQLTSFYRSKGCPELASFQTSDAWVEDDLDGIDTLSTQNVMVEEPVINEVQPTQDKPKRGRGRPRKQKAGHDQVVMEKRSTSNQVNDTSYNEKKRNLKSFEDSEKSSAPTGGGSFKIGECIRRAASQLTGSSSIMKAQNEPTVYNNAAEGENGEFDVSSDDAGDELTVEKRAKRRRLHINHAADPRELLSQLCLVATEPMNGYSFSAMIIGYFNDYRNYIVSTTTEANIVDKGTSRRGRKRKEVIPSPEVETTDHMQDSYWSGLSLYNHPVHDLKRESPTTRPRRKRRSSRHAYIPLSELGEPVPKKQIQVMERSIIHVDEKMVDELKPTALVLTFGRSASIPSELDLVKMFSLYGPLKERGTKVHRETNTVKVVFKKRVDAERAFSAAGKYSTFGPSLRSYRLVSMPLSPETQSANNPENHGLEIPGLNMSEAPKDSMEVDLVQKTDKVKVTGELSSEEVETVRQTCLVEAADSTFVSEVDRLEKAGNIDAELIVHVNQIGEGAEAASVSEESSQQVGDIEQAYTQKAASVSDLPTEIETLHSDAIIKELPQKAPDNMQTDIATAPKQSHNPGDNAVFEAVTEVPSTAQDHSEDDVGDEVPEEHTVFPVLQSQTPGEKLVGQSETEQKVGPEDPKSQAENLTVEPVVQGAVEQVEIELESKTTVEVSCEQGYSIEQTVNMEAVIEASGGQLEVGRRISEDESMADANIEHSMVMVDETVEAKVVPLEESTENNAATIGVVEETAEGETKEEAPDEKGKIENNEDADKLAGETRAGEITVEAPDEKTEIKADADTPAGETKECEITVEAPDEKIANKGIVEPIIREITEDQTAAGEPDEEATTTEETVEDVKVLDDKSTADGKPVENATVATNEDSTTVENTLKDAMVAPPGTNTTNAEETALGATVKALDEDALAVEKTIEDTSVEASDVQAGRCNSVYHNVF

SEQ ID NO: 69214 - protein, 364 aa, Zea Mays
MWRRRKPEEHFFDVPAEEDPEVHLGQLKKFSLRELQVATDNFSNKNILGRGGFGKVYKGRLADGSLVAVKRLKEERTPGGELQFQTEVEMISMAVHKNLLRLRGFCMTPTERLLVYPYMANGSVASRLRERQPSEPPLSWEPRRRIALGSARGLSYLHDHCDPKIIHRDVKAANILLDEDFEAVVGDFGLAKLMDYKDTHVTTAVRGTIGHIAPEYLSTGKSSEKTDVFGYGIMLLELITGQRAFDLARLANDDDVMLLDWVKGLLKEKKVEMLVDPDLQKAYEEVEVESLIQVALLCTQGSPLDRPKMSEVVRMLEGDGLAERWDEWQKVEVVRQEAESAPLRNDWIVDSTYNLRAVELSGPR

SEQ ID NO: 69215 - protein, 512 aa, Zea Mays
MSLRPSERVEVRRNRYKVAVDAEEGRRRREDNMVEIRKSRREESLLKRRREGLQAQVPAPPSGVEKKLESLPAMVSGVYSDDNNLQLEATTQFRKLLSIERSLPHRRSYQNRCSSKICAVSHQRGFPPAAENTKAVIDHGAVPIFVKLLGSGSDDVREQAVWALGNVAGDSPKCRDLVLANGALMPLLAQLNEHVKLSMLRNATWTLSNFCRGKPQPSFDQTKPALPALARLIHSNDEEVLTDACWALSYLSDGTNDKIQAVIEAGVCPRLVELLLHPSPSVLIPALRTVGNIVTGDDLQTQCIIDHQALPRLLNLLTQNHKKSIKKEACWTISNITAGNKDQIQAVISAGIIAPLLQLLQTAEFDIKKEAAWAISNATSGGSHEQIKYLVSEGCIKPLCDLLVCPDPRIVTVCLEGLENILKVGQHDKTMGATGDTNVLAQMIDEAEGLEKIENLQSHDNNEIYEKAVKLLETYWMEEEDDAMATAGEAAPAVFDFNQGGNPPAAGGLNFN

SEQ ID NO: 69216 - protein, 494 aa, Zea Mays
MQPPGPPLATPQPLPPAVAAELAQLESRLGQVAGEPARHELAELGEVAAVRVLRRIARSQEQVRTLTGYIVSAAVQETFALNAQAVPTAESRACNSSAPSLSDGSVQGPQCASELRMEEVTAGLSNYRMAICEGQGQEDHAVMMAIDNPPDCIPPWGWDQDCIEVDNLVPGIASQANQMPMQYGDRDRIQELVSIVPHGVRMLAESLENGRASELQNYVQNGIPEQWMVPADQRMESTSSRLQHVLKCLQGVGPFGHHLGPECAIMIPKPEPNVVVENLFREIASPHITDNKLRNTASPQMCALEDLEFSKRFLILSYLCRNNLEDEVVLTVDYIKSLKFLSMVHFESQIWRKFGQKNFQASNRAATDRAKNFDSDPTTTKLYHCNIEIRGESIFFVLKGPYMENKRTYLQKVLGDDNVLLVKFMVSSDKSTDFYRQHYHRVVEDGIVLGLRRYNFFGFFFGSFGGCMRNGPLVRDLKHWSCMQILSYWGFLTG

SEQ ID NO: 69217 - protein, 116 aa, Zea Mays
MVLKHTDPTAHAEVTAIREACKKLGKIELSDCEIYASCEPCPMCFGAVHLSRIKRLVYGAKAEAAIAIGFDDFIADALRGTGFYQKANLEIKKADGNGALIAEQVFEKTKEKFQMY

SEQ ID NO: 69218 - protein, 194 aa, Zea Mays
MKAQLETTTKVKQLREVHGAWLPPWLATHAARSMEVMSNHWNEHGKPAFDSFLQKASEKTVQTKKWAEPHLETAKTKWMPVAKEKWVTLKKHAKPYVQMVSEKSLEAYQTSSDFVRPHLVNAHQVVDPYFQEAKKLSKPYVDQIATATKPHVEKVRTALKPYTERARHVYGQFLETATTYHQQYQEEEENTSEQ

SEQ ID NO: 69219 - protein, 338 aa, Zea Mays
MAEREVVEGGTTTGGGLWRRYAPHVQMVLAQLCYTLMYFITEAAFNQGLNPYVYITYRHLLVAVLIWPFAYYLEKGLRPKMTLMLFVEIFVLSLLGMEIVDVKSLRGVAKVAGTVVSFAGVTTMTLYKGAAITSLWKSPVQIAGSGSGGGGVAHDSWVKGSVLAVASCVCWSIWYIMQASSLKRYPAQLSLTAWMCTVGGIQSTVFTLFMQHEPEEWRIGFGVKFWSIVYSGLACNGFTVFVQLWCTEKKGPVFVTMFNPLSTIMVAILAYFIFGENLYVGSIVGGGVVILGLYMLLWGKEKDQERGTGKEREQLETDCEKQAKKVSDCVYEAPKTTK

SEQ ID NO: 69220 - protein, 74 aa, Zea Mays
MARWAGQEKPSILGFGSRQLLFLDCMYNLHQEYIHIDAFQFTWTQHVRVIPAECELLHEHSRTTCGACLLCKCK

SEQ ID NO: 69221 - protein, 155 aa, Zea Mays
MAAPAPGATRLHPPFLLLPSPPRPHPPLRLRFLLPSPPPLRLRRRFPLLAAAAVSAGGGGGGEEAAGRKADKARQLQKRVLVGVAIGVGAGGIVVAGGWVFAAAVAAAVLAGSREYFELVRSTASGGGTPPPRYVSRACSAICALMPILTLSGQD

SEQ ID NO: 69222 - protein, 155 aa, Zea Mays
MPMKKLIAVAQARRFSRSTSFPDNFLNAKSPFDNIQQKKLAAHGANAARRSFKDFLSTLTRTKESISRATRVAMECAKFGIAGEVMYDAFGVRLHAGKQAKVLNQIVYELPLEHPLAETRPLRELLGHTPPQVFAGGVLGFAVATFIAMIAGLGS

SEQ ID NO: 69223 - protein, 63 aa, Zea Mays
MVAELFKHVRQQQATTVKHNHRLKSCPAPELIKFGCLVEGGLTADAAIQLFFTLVCILLTDVG

SEQ ID NO: 69224 - protein, 333 aa, Zea Mays
MAGEKAPRAFPIEELPGHLIGEVLTSGGLAAADLARLEATCRALRPLAEYAASKLCAARAAFAAMGPAARGGLLERCGGSWKKVLRFLQSVEQSSGTVETTSGSMQVATGRYHTLLVHDSSVYSCGSSLCGVLGHGPDTTQCAAFSRVSFPSLSCVINISASHNHAAFVLESGEVFTCGDNSSLCCGHGEVGRTIFRPMQVEALKGIPCKQVATGLSFTVILTRDGQVYTCGSNTHGQLGHGDTIDRATPKLIELFEGSTPVVQIAAGASYTFAVTDDGTVHSFGSCTNFCLGHGDQHDELLPRAIQSFKWRNIHVVRVSAGDEHAVALDALG

SEQ ID NO: 69225 - protein, 138 aa, Zea Mays
MQKRMPSQREQYRNTIQLFIGTGCSPCKITSRPFAFDNNSIVIYLGLDSLFLFKSVSSFLPSCRSSLAHSFGSVPSFVLFPCFFIPWALARRYLFTHYTPKTLLNHVFEDLRKPKAPNTFSLSLTTIPFPLGSISSGD

SEQ ID NO: 69226 - protein, 76 aa, Zea Mays
MTTSESPYTISFLMLNDTAMFNPWISASYSTALFDAGNNNWTAYLSCSPPRTMKRIPAPCSLQLQRAIKSTFAILR

SEQ ID NO: 69227 - protein, 226 aa, Zea Mays
MQDMSYPPQMLFVENVVGFEVSDTHDQLLEVLSSLNFNTQEFILSPLQFGVPYSRPRYFCLAKREPVRFRHAFVNNKLLQTPMCLSLTLSSTSQGSDHQTEEELEPVCKPIKDFLVKEADGGTPDETVLQDYMVPVNLIERWGNAMDIVYPEFKRCCCFTKSYYRYVKGTGSLLATSKNLNVPEEKLQISSLKELGLRFFTPREVANFHSFPSNFCFPDHISLRQQ

SEQ ID NO: 69228 - protein, 153 aa, Zea Mays
MSSWEAKARQFLLEEEKEDDELFLVIVPAVLLAMQEEKRSVRTRSTSAHGSAKKRKKNHVASVLEDYLEHRKKQTEKTVEALLEMKSREEEYSIERCLDIVDALEELTDEEKAAAAEVFKNEVNREMFVIAKQKIPNVGLIWLRRKISRIAST

SEQ ID NO: 69229 - protein, 161 aa, Zea Mays
MRNLTRPVDEKDCPLDYQIRCLHTSLEWNAYVAGSVDGVVALKYLDRGTDRDLGYAFRCHPNSRNGKWNLVPVNCISVHPCNRTFVTGDDKGCTIVWDAQLKKKLIELPMYLGSVASVAYNHNGQLLAVASNYFLEVDKEEQHHQVFIETVENFKGKSRVG

SEQ ID NO: 69230 - protein, 290 aa, Zea Mays
MLEMIASELEALSNQLAELEEKMKFLLLPSDPLDSRNILLEVRAGAGGDEAGIWAGDLVRMYQRYCERNNWKFKPVSCSEAEMGGYKTYVMEVKGKQVYSKLKFESGVHRVQRVPLTEAMGRVHTSTATVAIMPEADEVDVVIDPKDIELKTARSGGAGGQNVNKVETAVDLIHKPTGIRIFCTEERSQLQNRERAFQLLRAKLYEIKLREQQESLRNQRKLQVGTGARSEKIRTYNYKDNRVTDHRLKMNFELTSFLLGDIESAIQSCATMEQQELLEEMASSVGAVNV

SEQ ID NO: 69231 - protein, 795 aa, Zea Mays
MMQMVQRTFLLMNLLVLASNAIFLIVVIFVPFSLGRIILYYLSWFFSSASTPMLAKVMPFTETAISIANDTLKSALNVVKNFSSDSNNEGVIGHVIEVVTQSLKINATGLSVIQGTGKNSLMKGTTIASSYLSDLTTLAVGYMFIFCLVFLYIGSLALLRYARGERFTIGRLYGIATILEAIPSLCRQFFAGMKHLMTMVKVAFLLVIELGVFPLMCGWWLDVCTLKMLGTTIAQRVEFFTMSPLASSSIHWLVGIVYMLQISIFVSLLRGVLRNGVLYFLRDPADPNYNPFRDLIDDPVHKHARRVLLSVAVYGSLIVMLVFLPVKVAMRVAPSMFPLDITIFDPFTEIPVDVLLFQICIPFAIEHFKPRATIKALLHHWFSVVGWGLGLTDFLLPKSEENGGQENLNARAERRDRGHGGREMVAPQVEQLMIQHVAAEDNGRGDSNEANDVTEDSDVDDQGDSEYGFVLRIVLLLVLAWMTLLIFNAGMIVFPISLGRLVFEAVPRLPITHGIKCNDLFSFSIGCYILWSVAAGTRYAIDYITSRQLGFLVQQICKWCSIVLKSSVLLSIWIFVIPVLIGLLFELLVIVPMRVPIDESPVFLLYQDWALGLIFLKIWTRLVMLDQMAPLVDESWRSKFERVRDDGFSRLKGLWVLHEIIMPIVTKLLTALCVPYVLARGIFPLLGYPLIVNSAVYRFAWLGSLIFSALFFWGKRFHVWFTNLHNSIRDDRYLIGRRLHNFGEDSHSPERSESGASIGSDDQDRDIVLRDQEEEVGLRMRRNNMHANQQPRFAL

SEQ ID NO: 69232 - protein, 71 aa, Zea Mays
MPPSCSQSQALIDGGQKQYTDLVLLVRVFNVFLLVLYHVLLLEHKYCRVILIRILLILIEIQCTLPPKSSM

SEQ ID NO: 69233 - protein, 352 aa, Zea Mays
MGLSVLFPCCLLHSIIPTYQQGLIAMAYLYLPVLIFQFMVCFCQSVDRLTPAKPLLHGDVLISNGGVFALGFFSLKNSTSSSYVGIWYNNIPERTYVWIANRDNPITTNAPGKLVFTNSSDLVLLDSTGHTIWMTKNNITAGEGGTAAILLDSGNFVVQSQNGTDIWESFHYPTDTMVPDVSFSLSSSDVAKRLVAWKGPDDPSSSNFSMGGDSSSDLQIVTWNGTRPYWRRAAWGGEVTFGTFEGNTSFMVYETIVDTGDGYYMKLTVSEGSPSIRLTLDYTGMLTFRRWNVNTSSWAVFGQFPSTACAHYAFCGPFAYCDGTESVPTCKCLDGFEAMVLIFPKDVGERRS

SEQ ID NO: 69234 - protein, 86 aa, Zea Mays
MMDGGLLDEVCSIYDADAVYTQGLRQAIGVREFDEFFRAYLPRKESGEGSCASLLGMHDDQLKSLLDEAVSQLKANTRRLVRRQTS

SEQ ID NO: 69235 - protein, 395 aa, Zea Mays
MACSLDTLCGQAFGARQHHLLGVHKQRAMLVLALVSVPVALVWAYTGDILAWCGQDPEIAAGAGSYIRCLIPAMVVYGALQCHVRFLQTQNLVVPVMLSSGATALCHPAVCWLLVRGLGLGCNGAALANAVSYLANLSFLAVYVRVAPACKATWTGFSAEAFRGVPDFLRLAVPSAVMVCMEWWSFELLVLLSGLLPNPKLETAVLSICLNTSSLAFMAPLGLGAAISTRVSNELGAGRPHAARLAARVVVLLALIVGTSEALVIVLVRDLWGYAYSSEEEVARYTARMMPVLAVSVMLDGQQCVLSGVVRGCGRQKAGAFINLAAYYLAGIPAALAFAFVRRLAGMGLWFGILCGLVVQMLSLLSVTLCTDWNKEALKAKNRVFSVALPADMET

SEQ ID NO: 69236 - protein, 130 aa, Zea Mays
MSAAGGDLPETVEVTLRAVGPSRPTTLRLPPLLSVAELRGCIARERRLAGTEEVRLRLILRGKTLPHQDDSHVTLRDGDTLIVAVAPKPPVNHLLDDDVEDEEEDELNTTNDNLVEEEIFYVSSRQIEIA

SEQ ID NO: 69237 - protein, 137 aa, Zea Mays
MQTTKTKVINSCLNPVWNEEMTFSMKEPVGIIKFEVFDWDRFKYDDKMGQAFLDLQPVAAATKLRRALRLTAGETNLRKVNPDADNCLLSDSFVTYANGEVAIDARLRLREVESGELFVTIKWIEPDSANTGKQADH

SEQ ID NO: 69238 - protein, 485 aa, Zea Mays
MGLNARDDSDNGSGTQAQNSWTKLAVEIDSPQATSLDQLADPPNSTCAQVIHSKSEICSNRWLPDKSNRNCKKPKNTNDDFKGKDLEIGGPENLYMGHQSSPNGRSIKAADHENNSKESMMENLEEPTVRAADLIGSMAKNMDTPQAARAAEDTPNFSSKVPEGKGKNNQNDKYVLPSLELSLKRSRSCGDGANNKNTVKDDEQRNCVLRRSNLSAFTRYHTSAASNQGGTGLVGSCSPHDNSSEAVKTDSTYNMKSNSDAAPIKQGSNGSSNDNDMGSTTKDVVTKPMLPSAIKANGYTSAFHPVQQWMVPANATAGKTKADENTARNHCVHFENGGSGALQCGSSNVFDPPLEGQATNNYGGVKAGSNSGSNKGQNNGSTAAANAGLAETEIQAMDKSGVGGGNGNGNGSGSGSGNDTYVRRLAANMTPRQAQLKKYREKKKDRNFGKKVRYQSRKRLADQRPRVRGQFVKQAVQNQDGARER

SEQ ID NO: 69239 - protein, 74 aa, Zea Mays
MTVMHERQRAITATLIIFVLGGIPEHGYCHGVITLGHQARSNWPRGRGPKVTARSSLCLAVRRHQILPSPCLFH

SEQ ID NO: 69240 - protein, 204 aa, Zea Mays
MAMGLPGHRCCRLPALGSVTPLCPALARRPLPRTSDLRYSSLEAQAGDTIGEEVLRMFLEERQLHGDFVTKISDMVWRRNGGNVDAVEATTDQGNAVDVAQPEDVREDVVDDGMLRLAATRGWVPGDSSPPLSKRLSAKDWQNERDKRKELNLLKYEALKDELLLLTTGIGAACSLYCLLVFSLECSLVSDLLIISSLIGHPDT

SEQ ID NO: 69241 - protein, 1098 aa, Zea Mays
MFAKRLFHRALVHHHQGVGRGGGGGASAPAASPADAIQMDAQISTHCGVPYTASLLAFDPVQRLLAVATLDGRIKIFGGDNIEGLLISPKSVPYKFLQFITNQGLLVAISNENEIQVWNLEFRQLFYSSQWDVNITAFAVIERTFMMYLGDENGLLSVLKYDVDDGKLQIMPYNVHIHSLIERSGVSLQDPQPIVGILIQPDTFGTRLLIAYERGLLVLWDVSEDRAVSVRGYGDLRMKGQINGAQGDSGEDQLNTTIDDSEEEREICSLCWASREGSTVAVGYITGDILLWDMTTKSSRQEKQSDVSSNVVKLQLASGSRRLPVIVLHWSAGSAVHSNKGGHLFVYGGDDMGSEEVLTVLSLESTAGLESVRCMSRTDLKLDGSFADMILIPDTGVPDKSRTSALFILTNPGQLNFYDGGSLFSVQNSKEGTPLPEAQKFPVAIPTLDPNITVTGLYSLTESEFPNISLKKFCARKNAGHFISENMKWPLTGGVPNEMSLDEDHAVERIYIAGYQDGSVRIWDATFPVLMPMFVLDGNVADVNLDGANASVSSLAFCSLSMTLAVGTTSGLVRIYKLREHTGGSSFHFVSEFKQEVHVVHHGKGFHCYVAFLSANSSVLSLLFMASGGLLAAGYQNGQVAMLDPSQLSILFTVDGASGTNSPVVSLGIYSVAASAAKADQSKKDNPQNATLSRDVLLSLTKDARVTVLDCTTESDETQTQLSEDKIPSQGQTGKDGNDLDKIQTQGIEKHLKNASQLSQNGGSDSLLVVCCEDVLLLLSLASLIQGSSKHLQKTKLAKPCCWSAVFKNMDDKVCGLILAYQTGTIEMRFGPDLAIVAETSLMSLLRWSYKTGMEKSTSSSNGQVTLVNGSEFAIISLMASENDLRIPESLPCLHDKVLAAAAEAAMSFSTDQRRKQNPAAGIIGGFIKGMKGKAEENAKMRESLTLRAPSEQLESIFSKEPFAEPSIPDLDDPMEELSIDDIEIDDEVAVALAQAASSTSQGNKRTAVEEERAKLFEGSNSADKPRMRTQQEILTKYRFGGDAAAAAAHAKDKLMQRQEKLERISQQTAELQNGAENFASLAQELAKTMENKKWWKL

SEQ ID NO: 69242 - protein, 100 aa, Zea Mays
MRLCRARFLARSCSVLLVPRPRLLCWSRGRFLFPARLPLLPDLPRCPSSCARSVSSRGFVLAWPRPASMTAVEASLLRRRAFASHGRCNSARPTALLPAC

SEQ ID NO: 69243 - protein, 272 aa, Zea Mays
MGAKTMFLQNIPIPENFLSLRAEFSNEVALLKSIEHKNLVQLLGYIDKANERILITEYISNGTLREHLDGQHGLVLGFNQRLEIAIDVAHGLTYLHLYAEKPIIHRDVKSSNILLTEAFMAKVADFGFARTGPTEPDQSQIETDVRGTAGYLDPEYMGTSHLTIKSDVFSYGILLLEILSGRRPIERTRGPAERITVRWAFNKYRRGNVRGILDPMLTEAVNEDILNKIFDVAFQCVAPTREDRPSMKEVVERLWKIRRDHTKIQRIAELTL

SEQ ID NO: 69244 - protein, 960 aa, Zea Mays
MSTRLASGSKDGTVKIWDDRKQVPLSIFKPHDGQAVYSVAFLTAPERPNHINLITAGPVNREVKIWASTNEDGWLLPSDSETWKCTQTLELVSSLEPRVEEAFFNQVAVLHQASLILLANAKKNSIYAVHVEYGPDPASTRLDYIADFTVAMPILSLTGTHESQPDGEQVVQVYCVQTMAIQQYGLELSLCSPPTADSTGFGRDPAISRVYEAALEMAGTEPSIGTSCTDSYSVTALSKQPNVDQSAELDLKPSAPPLAYSEGDSSMPLPFTALAPKIEVPGSGPAPGTRDIEQSAFNYTNTTNRNMERDALKRQDTPMPIRKDILGKDEPRDGQSNVPMLPNPHMVFQVGGNATRLVTPSEIISGTLSSAENNDVSESGGENRDVSSGSSWVAEVEPKHIDESKPDQNLGLEAVKETQIVCENMAKTSMEQTVEMITKRSVTTDKHSVEESQSSSDRPASDQTCGTDENVLKKFVEMPEKIDYSASREQPSLFTKEKVLHPQTSGQPSPPVSAFNSTEPHEPLSSTYLPVSSFPEDAATQGMLQQLLDHQKDMEKQLSTVVPVSIAKEGKRLETLLGRTVEKSFKANIDAFWVRLQEENTKREKADRERMQQLCTLITSSINKDLPSNLEKSLKKEISSLGPVVARAITPVVEKSITSVVSDSVQKGVGDKVCNQLEKSITGKLEATLAKQIQMQFHTSGRQALQDALRTSFESLLVPAFEQACKTMFEQVDGAFQKGMSEHSNAIQQQVEAAHTPLALTLKETINSASSITQSFSSELLDGNRKLLALVTSGNAKAHNTSALQPINGPMGGPQEVEAPLDPMRELSRLISERKFDEAFTMALQRSDVSIVSWLCSQVDLRALCAMVPVPLNQGVLLALLQQLAIDIHNETSRKVQWMTDVAMAINPADQIIAVHVRPIFEQVYSQLAHQRTLPTTTASDGTSIRVIMHVINSVLLSYK

SEQ ID NO: 69245 - protein, 86 aa, Zea Mays
MRAYISFFCGNMNDVMQMIFLKHCCHSSSIRFEVFLYNYNAFHDPIWFCFLFSNNSEIWLMRIVYVQLSVHLGVSDIRQRNFVMKD

SEQ ID NO: 69246 - protein, 295 aa, Zea Mays
MPPPLLQARDYMGAGATPLSCSSSGEGTGPHLALRLGLPGSDSPGRDAGPEPDHAHVDAALTLGPAPAPAPAPPRVGAKRGFADSRDRCAKRDATAADDAAGGVTGEEKRVGAAAAGAPPAAKAQVVGWPPVRSYRKNTLAMSATKTNGEDEGRSEAGCCYVKVSMDGAPYLRKVDLKTFSSYEDLSLALEKMFTCFITGQSGSCKTSRRERLTDGSRADALQDQEYVLTYEDKDADWMLVGDLPWDLFTTICGKLRIMRGSDAAGMVSNLPAAPRSPEQIVGTRIRNVARHAES

SEQ ID NO: 69247 - protein, 356 aa, Zea Mays
MLLNGDSRRAAATAAALLALAACFCAATGDGDMAGPRPLVLVVDQSGKGDHRRIQDAIDAAPASNRSAGGRGSVVIRIKPGVYREKVVVDKPCITLVGATAASSTVVITWNESWVAADSPTVSVLASDFVAKRIAFQNTFGTSGPAVAVRVAGDRAAFYGCRFTSFQDTLLDDTGRHYYRGCYVQGGTDFVFGNGKALFDCTDVANQICVVTGSSNGVRVPADVQKCHLHSVSPAGGAFTAHRRSSESEDTGFSFVGCKLTGLGAGTSVLGRPWGPYSRVVFALSYMSGTVRPQGWDDWSDSSRQSRSRTAFYGQYQCYGEGSRTDGRVAWSHDLSQAEAAPFITKVWVGGQEWLR

SEQ ID NO: 69248 - protein, 71 aa, Zea Mays
MNKYYSCCPINNTVINENIKAPSPCFISLYSHPLLSSILMGTKTKTEAHIFLLVSKQRTKSIFFAIMKTNN

SEQ ID NO: 69249 - protein, 258 aa, Zea Mays
MASEGNKDVPHEALTVDHSSISGSKRKRGRPRKYEYPVNELPQKVQPIQSAPPLLHCTQDGSSLASHASGGGAHAIPISVAPINPEMRTSARQDAELVIPQSSVSAVPIKFVCPASVPCKQLANQNEFTGNKSVDEVQKDSESPNVTKESPVKAEKPNIALVDVVAKDSLGEGQQLNDQVTDVVRDFSGQTQNVDVTMSDEIKIASGARDKPNSANCEQQSSKEPSDITEQSEQLKTETDVQKGVDASDDIHPAHDEQ

SEQ ID NO: 69250 - protein, 362 aa, Zea Mays
MASEAESPVVIHAWSAPRSLSTSLMYSFAQRDDMEVLDEPLYANFLRATGVDRPYRQELLSKMDPDGNKVVKEVIFGPGDKKYRYCKHISKQHLPNLSSDLMKKGKHFILIRNPLDILPSFDKVVPPSFMELGIGELVSIYSELCGLGSPPPVIDADDLQQDPEAVLSGLCEDLGIPFQPQMLKWEAGPKEFDGIWAPWWYGSVHKSSGFSKPRQYPLTFPFVFYDLLEQSLPFYNMLKRQIRKIRGPQQPPLSDPPLPVPANKNILVWVGDELLPRNSAKVSVFDSVVQGGDAVWEGLRIYDGKVFKLDEHLDRLFDSAKAMAFSNVPTRDWIKDAIFKTLIANGMFNNAHIRLTLTRGKK

SEQ ID NO: 69251 - protein, 212 aa, Zea Mays
MGRTGVGPRREVQAPSMGRNLGWARAGRTGSSAEDKTALRIEQGGSTRAMRSSALQKFEQRARAAGHTAAHVCDVQRAGGIEQEIVARWNARPDAASSERDAHRRGRSEPGKRRAEAGAGNELDTGSSMARGELDAGTRVALRLGVRGRAEGKKNRDMTRVGSFKLSAREKGLSWSLEKHQGDGRRKPRRYAERERTTGRCRKRAPPREEDK

SEQ ID NO: 69252 - protein, 322 aa, Zea Mays
MARPDTRKRRGIRRDRHDPRLQRPDLQGQWPRRLRHEPPGSRGGHCTDAGDAEARHCGHARCSNTLARLAADGADRRGGRGGAVSGGGDLLGLLLEAWTPQPQHGNGGETLTTDEVIDECKTFFAAGQETTATLLVWAMFLLAVHPEWQDKVREEVVREFCTSDDGEVPHADVLAKLKLLYMVLLETSRLYPPIVYIQRRAAWDAVLGGIKVPQGTVISIPIAMLHRDKQVWGPDADEFNPMRFEHGLTKAAKDPKALLSFSLGPRVCTGQSFGIVEVQVVMAMILRRFSFSLSPKYVHKPKYLLSLTPKLGMPLIVRNVDG

SEQ ID NO: 69253 - protein, 173 aa, Zea Mays
MAVGCGSLPVSLSLSSGGRRLWLSPCLHSPAQGARQSRGRRPQSRSRRRRQRHPHRRHRCQAGGHRLAVRRTTRSYFGSKNNLTQISVLAKSIRTLARMEDPINQILKRTEVAENLILEKTSCPLGVLLVIFESRPDALVQIASLAIRSGNGLLLKGGKEAMRSNKVLHKQRG

SEQ ID NO: 69254 - protein, 980 aa, Zea Mays
MAVYYKFKSARDFDSIPIEGQFISVANLKERIFESKHLGRGTDFDLMISNAQTDEEYADEATMIPKNTSVLIRRIPGRPRKPIVTEPEETKAAEDGVQDVMPTSGAFLGDSSMKYPEESEWDDEFGNELYISDSVPYQPVCQAVDAIENKVDEDSKIKALIDTSALDYSQIPDGYGSGRGYGRGMGGRMMAGRGFGRGLERRTPPPGYVCHRCKVPGHFIQHCPTNGDARYDVKRMKPPTGIPKSMLMQTPDGSYALPSGAGAVLKPNEAAFEKEIEGLPTTRPVGDLPPELRCPLCKEVMKDAVLTSKCCFRSFCDKCIRDYIINKSMCVCGATSILADDLLPNKTLRETISRILEAPPTSSTENVGSMVQVQDMESALPVQPKHRSPAVSAASKEEAKASTLVEESPDAESLNGTKATNIDASSSDKKALTVPDIAEGTLDSKKAKEDKPVEATPVAKDSQEKFPAGEQDTDFLLEASAVKKKKKKKPRVPGNAEEQWKNFQDFGTENFSGMPLGPTGAFNPYWGGGVPLPMDYMNAPFPGPMPYMGYPPGPFDPFGGGVLPQDPFMPPGYMMPGVPRDLSELAVNAMGINMGPPVMSREEFDPRKPEHRRRREMDRFNDRERERDRSRERERERERERSLERERERERERGRSLERERERVRELERSREGDRERQRGRDRDRDSRREARASPGAINDSSSMRRNDVCLFLSICYHAKFCTIIGSMWIIFAAVSATVDSLIQRFALGYKQQSPAVAFALVIVLSWVLQDAIATAERSLGDSIRIFKRSRSQPDRSERGPPQPSSPDRQSRRSSSGKKRSSSDRYDDMPLPPPPPLPATRHEAEPAKAPGSSSKSKASVFSRISFPGDGANPSDAKRSRRASDKPPARSSSSSKKSAAAEGGDGRGHRHHREPAAAEEEKPRPAASGGDYYGGTDGEESEDEEQHFKRRPSSSSRREREQDAPEEQPRHSRRSRDHRRR

SEQ ID NO: 69255 - protein, 81 aa, Zea Mays
MNRTHLRPIQPESPTHYKLPETAPHSVEIGRPTYPNPARPGQPPKNGNEAIKPEAGKRGPTQQHQTSKPPVRNQENKRQAS

SEQ ID NO: 69256 - protein, 108 aa, Zea Mays
MASRPVATSISAPRPPHPTRCTAAAASPPPPHHRPEYHRTRRRGRISPRQGPAEHCRRLHLRVWATARVQGSSRVRDQIRPVEQHPQHHAHHPPLPRHRRLHPRQESR

SEQ ID NO: 69257 - protein, 476 aa, Zea Mays
MGLEPLDRQFPCLLQAQAKQHRTAAPPLPFLFLRILLPFRRPSLFSLVATKTTDADADALRQVPGSVGSFAGEEHPPGDPVLFWCGFIAEVLLWDFPVAKMIRLPMYAAFSLLATASAAYYAFSSREQFYPAMVSLIQKREASVAIFFSFEYTILATSTLSTFVKYIFYVSDMLMEGQWERKAVYTFYLELISDLVHLSLYMLFFIAIFLNYGVPLHLIRELYETFRSFRIRIADYIRYRKITSNMNERFPEATSEELDASDATCIICREEMTTAKKLLCGHLFHVHCLRSWLERQHTCPTCRAPIVPADNGRAASSRQHGAQAGVQPGTATPSSEGAPGENMSRRQAKLEAAAAAASLYGRSFVYPPANTLNSRSGSPQPTSSAPQSEASSSNHQSQKDQETQLQNSSDGLVPLPFSADGVVGSGTSTRDLENSLQKAQENFIKSQIEMLQIQLQMVQRGAAGLSSSENTEHTED

SEQ ID NO: 69258 - protein, 531 aa, Zea Mays
MACHICPLFNLRLLLLLGAVLGNGGLGRGGGAEASDRADPDPYSILMWHDYSPPSPPLPPPDPPSPTATCEGDLHGKGDFHTRCEVSEEVELDGDVYITGNGSLVLLSGASLTCEKYGCVISANFSGEVRLSRGVRVTAGRVSLVATNITVADTVVVNTTALAGDPPDRTSGVPTGTHGDGGGHGGRGASCFVKEGQTQEDSWGGDAYAWSDLEHPWSYGSKGGSTSVEKDYGGDGGGIVWLFAEDLVMNGTVLANGGDSNEKGGGGSGGSIFIRAASMHGGGKISASGGDGLAGGGGGRVSINVFSRHDDTQIFVHGGRSSGCPDNAGAAGTLYEAVPKSLIVSNNNLSTQTDTLLLEFPNQPLWTNVFVRNRAKVAVPLLWSRVQVEGQLSLLSGAILTFGLTRYPYSEFELMAEELLMSDSTIKVFGALRMSVKMLLMWNSRMEIDGGGDSIVATSLLDASNLIVLKESSVIHSNANLGVRGQGLLNLSGDGDTIEAQHLILSLFYSIQVGPGSVLRGPLVNRSSDDV

SEQ ID NO: 69259 - protein, 267 aa, Zea Mays
MSAAPAVAARDGERSSPADKDRADSAAVSARPRAARSGKAGGAPCTPEREEPAFKTVVYSASSSVGGGRGRRALAEFSSYVVRKAPPLERRVECTLEELCSGCHKEVRYTRDVVTKNGLVTKEEATRTVRVKPGMRKGATVTLEGAGDERPGCLTGDATFVVSERRHRRFKRLGDDLVLRARVPLVGALTGWQLSFRLLGGDRFRCAFRDEVICPGYVKVVRGGGMPVAGGAKGARGDLVVKFDVVFPEDLTDEQRKGLAEILRGCG

SEQ ID NO: 69260 - protein, 630 aa, Zea Mays
MPSPMARIFHRHLLLAVVTLAVAASLLRPAAAVRPFVLVLSGEDFLKDPAAHPSLPSADSDDDDGWDDFADDSPAADPLLSPSSWAPLLDPTISLPSGDETDSPADALFVAGTRAMLSAASDGDDAAFTTAAAQIEASAEAGHPGAQSALAFLTGAGMTRPASRSLAFLLHKFAADAGDLQSKMALAYSYFRQEMYEEAVILYAELAEAALTSSLISKEPPVIEPIRLHSGTEENKEALRKSRGEDDEDFQITEYQAQRGNAANMYKLGLLYYYGLRGLRRDYGKAFHWFSKAVEKGETRALELLGEIYARGAGVERNYTEAYKWLALAAKQQHYSAYNGLGYLYVKGYGVEKKNLTKARELFELAAENKEAGGHYNLGVLYLKGIGVKRDVIRACNFLLHAVNAGQPKAIYQVAKLFQKGIGLKRNLHMATMLYKSIAERGPWSSLSRWALESYLKGDVGKALLLYSRMADLGYEVAQSNAAWILDRYSDQSICMGESSFCTDMERHLRAHALWWHASEQGNEHAALLIGDAYYYGRGVARDYERAAEAYMHARSQSNAQAIFNLGYMHEHGHGLPLDLHLAKRYYDQAVEVDSAAKLPVMLALTSLWLRTNYADSFLGEFGYRNPLGI

SEQ ID NO: 69261 - protein, 65 aa, Zea Mays
MAAALHRPLPSMASRVRAPTPPPHSWSSLLPPSPMNPTSVMPSVPFRSQISASPGSGHSRGPSAT

SEQ ID NO: 69262 - protein, 652 aa, Zea Mays
MKSTVFSTAVVSIGYALLGWDFAALSEANHHMEKEFELLNGPSIEGITLAASTFGAIVITIFSGALLDWLGRRVILVYSSLVLFSGGVLMLWSPNIYIVLLARLIVGSGSGLVFTCVPIYISETSPSNMRGLLGTMPQFMFFIGTIFSYCLIFWLTLMSSPSWRIMIGAIFAPSIVYFALLVYYLPESPRWLASDGKISEARVSLQWLRGKKHDVSGEIAAIVEGVDIISDSTVGAARAQSFSGTSASHTWPRSTFYWQLSDPLVDLLGSVHENMSEGGSRRNSFFPVFNSFSFPEHEHMNEHRDGNSDQQTRETYYAGEANNGDGLRASLLSQAASVEVNDTNTSFTSEGSSSYLRRHGTSVLAQEFMASIHDYDIEEEEEEIHGFALPHQSAPRDMESTGRHPFRHQIVRLSETADMKFKWRVLLQPGIRHALCYGMLIQALQQSTGISGLLRCAPEIFEQSGVASLFSDIGLSPHSTSILMSTLNALLILPCITAAMLLMDVCGRRVIVLATTPVLILSLSVMSMSTLVNMGPFESAVLFHFALTICFWSYVIGLGPIPNILCSEIFPTKARATCASFCSLSFWFGGLLSAYCFPVMLSTIGLGGACGIYALVCCAPLFLVYYRIPETKMLNLELIAELFKLSRQEHVQ

SEQ ID NO: 69263 - protein, 76 aa, Zea Mays
MPLPSALCPTSLGSVLCRTSATVPPPSVHIVAPPRCALRRTLSSAGESQRRASASPNWLTRTFARNFTNISECIFL

SEQ ID NO: 69264 - protein, 331 aa, Zea Mays
MRKKANKLIQLGNSNNTIQAHLQENNEWVEWQTNVLVKRNEVENVYHWACGRPASLHDRGRDSDDDDFRDRDYDVAALANNLSQAFRYGIYSSDDIEEAQGSLERDDEDVYFDDESAEVVISSLRLGDDQEGSLFTNSNWFTFDGERGIDDRSSASVPSSSPNSEETSLKTEEADDGKVIGTEDEMETVYLGNGSVEEVKDVAECTEQPNCCTEEERLKNEEGMEWHPNASNNDTEAEAAAESSAPSVEIVAEKTVDEPLEVGRKLDEPAESSLDSSVSVALPAPVNGSEPANSEVSSEQVAHATDVQQPVKEAPAEDDDAKKTDAAKTNE

SEQ ID NO: 69265 - protein, 126 aa, Zea Mays
MLFSLLPLLETSMVGPCSACLSSLPPPRLSLSPFVSLPAASPSAALIVHFTSAQSRRLLSPSSSAPVFGDIHRFLRQLHFLVELLLVSLGFLSSSCFLIYLHILIFPALQCEMWKGLPQLDLCIFI

SEQ ID NO: 69266 - protein, 974 aa, Zea Mays
MLDFCAPHGPAKLPVASVAGVRVAGRWLWRSAAVGAVRHGVSARASSFGSRIGLDSQNFHTRDLSQLLWIGPVPGDIAEIEAYCRIFRAAEQLHTAVMSALCDPETGECPVRYDVESEDLPVLEDKVAAVLGCMLALLNRGRNEVLSGRSGVASAFQGSEDSTADRIPPLALFRGDMKRCCESMQVALASYLVPSEPRGLDIWRKLQRLKNTCYDAGFPRADGYPCPTLFANWFPVYLSIVSDDSGMDELEVAFWRGGQVSEEGLAWLLGKGFKTIVDLREEDVKDDLYLSAVQEAVSSGKIEVVNMPVEIGTAPSAEQVQQFAALVSDGAKKPIYLYSKEGVSRTSAMVSRWKQYVTRSERLAVQNHSLNGNGNILTNHKTMQHTGIPSSSPNGAENGMITESDRTMNNGESSEIDIDTARHNLEVTNALCNDQSTQQGEMPDTVAELLSNFKLESNPLKAQFPTCDVFSRKEMTKFFRSKTVYPKSVLNSRRRSSSLVIRRKQNLCTERSGTNDYEAAEFAVLRSSNGKSFDSDYILSVASGITDGKPSNNEASLIEEKEREVSVATIDTRASANSSNRKVQVGSQESAEKNSTPYLERNKSDNVDRNMCASATGVVRLQSRRKAEMFLVRTDGFSCTREKVTESSLAFTHPSTQQQMLMWKSPPKTVLLLKKLGDELMEEAKEVASFLHHQEKMNVLVEPDVHDTFARIPGYGFVQTFYTQDTSDLHERIDFVTCLGGDGLILHASNLFRTSVPPVVSFNLGSLGFLTSHNFEGFRQDLRDLIHGNNTLGIYITLRMRLRCEIFRKGKSMPGKVFDVLNEVVVDRGSNPYLSKIECYEHNHLITKVQADGVIVATPTGSTAYSTAAGGSMVHPNVPCMLFTPICPHSLSFRPVILPDSARLELKIPDEARSNAWVSFDGKRRQQLSRGDSVRISMSQHPLPTVNKSDQTGDWFRSLIRCLNWNERLDQKAL

SEQ ID NO: 69267 - protein, 156 aa, Zea Mays
MHWQYRTICRGPNSILKNLYDVVGSKADDYISFYGLRAHGRSDDGGPLVTNQIYVHSKLMIIDDRMALIGSANINDRSLLGSRDSEIGIIIEDKEVVSSIMDGRPWEAGKFSLSLRLSLWAEHLGLLPGEVSCIMDPVDDSAYKNIWMATAKEPFE

SEQ ID NO: 69268 - protein, 298 aa, Zea Mays
MIGKGSYGTVYRAKLRHTVAAVKVLNSPEGCGTQQLQQELEVLGKIRHPHLLMMLGACPEHGCLVYEYMENGSLDDMLQRRKQNSSPLAWFDRFRVAWEVAAALMFLHSSKPEPIIHRDLKPANILLDGNLVSKIGDVGLSTLLPVPGTGGGGQDVPSTMVKDTAPVGTFCYIDPEYQRTGVLSMKSDVYALGIVLLQLLTARPPVGLAHAVETALEEGRFADVLDAAAGQWPLGEAQELAVLALRCSEMRRKDRPDLNGRVLPALERLKDVAAKAREGAFQGHAAAPPSHFICPILQ

SEQ ID NO: 69269 - protein, 1004 aa, Zea Mays
MKRKRSVGTMLSRGSDVDRDVKSAGQHRPANEVRPRSSDGLGYRHGVSAGALVGNKLDGTSQQNNIVSRILSKSDADYVAQPNERRERHPGVEKERTTLKGNKANSSDDMQNVSLNPLPKAKACRAPRTSSLAMNSSSNFQRSTGGSDEWEETPYPNKASPLGGMTNRKRSTHSNASSPPIAWVGQRPQKMSRTRRANVVSPVSNFDEALSEGSPLDTATRSAPIESGSVLLTKNTSTTKMDNISSPAGLSESEGSAVNESKSKEKAMHSGEVGNEGANAAHNAMGLIFSSNKNRIPLKEELEDGSIRRQGRSGRGAMHVKGCSPIPKEKLDTAETRKPTKGGRPGSEKNESKLGRPPMKKASDRKASSWHSQALNSDITDITGEPEDDQEELLAAVNAARSAIVSAYSGPFWKKMEPMLTFMSSENLSFLKNQINLVEELEVSMSCMSDGEHDIIASVGHRRMSKMEEHSSQGLVPSNFSPSSQQSKTNGVGEKGLVGCFSHGDESRTGPQKLEADKWFNEMAPMTHRLLSALIMEDDLPDSNGVQRDILVEFPNSHNPYTVNRYLENELQASAITSNFGLSVDFVHSNSTSVVHQSMCNGFTASSNFINSNSENSVHSENLSDGLNFTVYPESGPLHDLIPLTPRQCQNPGKDFPLSPYEYQYGQMSMEDKILIELQSIGICPETVPKLDDGEDEDINKMISELRKRLHDQVNQKKCRLHKLDKSIQDTKNIEERSLEQHAMNKLVERAYRKLKGGRIGSSHKAGVSKSANKAAKQLALAFAKRTLVRCHKFDETGKSCFSEPSLWSILSAPLPSSDSKCTEGVERLKHQKLDRTPFDQGGAKWKKVDRERDHNRDASAKGSGLKSGRHSSGGSGRSGERKNKTKPKQKLAQLSTSGNVLGRVVEPFSSPTVQEPPEPASEKKTQHPTRGASSSAAQRLTVDAGLPVLPGLDDILDVPEGLDGQGNDISSWFTDGLDDSLQDIDLSGALEIPDDDLTQLGFM

SEQ ID NO: 69270 - protein, 217 aa, Zea Mays
MVLNSAKDVPALFHSTGISRTEPSADIPLEYSPLNPVCDIMDPSLNCRSIPTNNCESRALVEKSEHCPDDYNLEMKRKRNDGTKGTVVLNSGSKVEGLLCLLEQAIHSGRALVLSEDELADSDLVYEKSVAFTKSIPRRLVFENTRRKSSARRNVPDNHARTKTHLVENKMLSSPVENKFIVNGGSAMQTIDHGQEFLSDVVHQGTLRVDELAKLLA

SEQ ID NO: 69271 - protein, 189 aa, Zea Mays
MAALRHLAAGPTCHHHHHHGVAAATASLRLHRLPLPFRPLRSRSGSFTRVYAISSNDIRVGTNVEVDGAPWKVLEFLHVKPGKGAAFVRTKLRNYVTGNTVEKTFRAGSTLQEPSLSKETKQFTYKDGSQFVFMDLTTFEESRLNEADVGDKQKWLKEGMDCNLLYWNGKEEQSLQPWKLELLSLCPLL

SEQ ID NO: 69272 - protein, 97 aa, Zea Mays
MGRSFRDSLKVLEADIQHANSIASEFRREYDGASLQMRMAYCPAAHFFLFLVQWTDCNLAGALGLLRILIYKVYADGTTTMCTHERKASIREFYVVF

SEQ ID NO: 69273 - protein, 105 aa, Zea Mays
MVVEEIAEGVKNLTVTGDAAASGGEGQRRGGGGSSNRIQVSNTKKPLFFYVNLAKRYMQQHGDVELSALGMAIATVVTVAEILKNNGFAVEKSETSGLCCLVDYA

SEQ ID NO: 69274 - protein, 412 aa, Zea Mays
MNRPPSRLPKPRPPVPVAMVVVVSTSLCSFLPAHPFSLARPRRPHPTNPTAKPLSRTLSIRCIATTAAGPPPLPPPKLVRCPALDRQAARASRLRFARKLLTLLLSKPRHFLPLRVLNRCRRFLGLPRRGRPLIPMVLRYPTLFRLFQAHTSLPLSPSLSTLAVALTPAAEALAADLAALRATGTGAGALAAKIHRLLLMTPRRNIPVSPFEPLDEGASLEMLERRACAVVREVLAMTVEKRTLVDHLTHFRKDLGLPNRLRAMLVRHPELFYVSVKGVRHSVFLVEAFDDDGRLLVEDEMLVGRDRLEELVREGKRMRRARKKGVLTFDGDSDEDEDDDAAEEEGSLKVDDEFGDLFEDGVIGEDWEEVGDGGGSDAYEEYDAESGDMEEFWVKKAVAQGLVGNGNEQDVW

SEQ ID NO: 69275 - protein, 162 aa, Zea Mays
MEQWERNFYITALAGANNGSSLVIMSRGTQYAQQSYKVSDTFPFKWINKKWKEGFYVTAMATAGSRWAVVMSRNAGFTSQVVELDFLYPSEGIHMRWDNGYRITATAATWDQAAFILSIPRRKPSDETQETLRTSAFPSQHVKDKWSKNLYLASICYGRSVS

SEQ ID NO: 69276 - protein, 55 aa, Zea Mays
MMIHYGRFLQGARRRFFYYFLLLFGTSAFTENYIFMYGRVGDMEFKLIPILDLID

SEQ ID NO: 69277 - protein, 542 aa, Zea Mays
MTASPYPTTPWLRPPPPMAFLSLLLLLGCLSPSISLAGAEAAGVLRQVVGGDDGGTFFEPFNVTYDHRALILGGKRRMLVSAGLHYPRATPEMWPSLIAKCKEGGVDAIETYVFWNGHEPAKGQYYFEGRFDIVRFAKLVAAEGLFLFLRIGPYACAEWNFGGFPVWLRDVPGIEFRTDNEPYKAEMQIFVTKIVDIMKEEKLYSWQGGPIILQQIENEYGNIQGHYGQAGKRYMLWAAQMALALDTGVPWVMCRQTDAPEQILNTCNAFYCDGFKPNSYNKPTIWTEDWDGWYADWGESLPHRPAQDSAFAVARFYQRGGSLQNYYMYFGGTNFERTAGGPLQITSYDYDAPIDEYGILRQPKWGHLKDLHAAIKLCESALTAVDGSPHYVKLGPMQEAHVYSSENVHTNGSISGNSQFCSAFLANIDEHKYASVWIFGKSYSLPPWSVSILPDCETVAFNTARVGTQTSFFNVESGSPSYSSRHKPRILSLIGVPYLSTTWWTFKEPVGIWGEGIFTAQGILEHLNVTKDISDYLSYTTR

SEQ ID NO: 69278 - protein, 97 aa, Zea Mays
MAHTVFPQPFLLPWAPRIEHGGQGTHHGGHHGRARVTTQARLPDSKERHAEENATNNMDRLITCNRLQRSPPTVRAEPTVEHQLRREIAGSPIGNPI

SEQ ID NO: 69279 - protein, 845 aa, Zea Mays
MAPKAPANNGAVVVAGGHHGGSTDVGGVAGGATTTTVPTSVAANGNGKQHGTRKQRRPAAVVVSPMDKYWTPVDDKEAAEAVDDGGEDGRRPLLFRTYKVKGILLHPYRLLTLLRLIAIILFFIWRIRHPHADGMWLWWISIVGDFWFGVTWLLNQVAKLNPTKRVPDLSLLRQQFDLPDGNSNLPRLDVFINTVDPINEPMIYTMNSILSILAVDYPIDRTATYLSDDGGSIIHYEGLLETANFATLWVPFCRKHSIEPRAPESYFAVKSRPYTGNVPDEFADDHRRMSKEYDEFKVRLDALFTKIPERSDAHNAEAKEGVKATWMADGTQWPGTWFDPAENHKKGQHAGIVKVMLNHPGDEPRFGGPASAETPLDFSAVDVRLPMLVYISREKSPSHDHQKKAGAMNVQLRISALLTNAPFIINFDGDHYVNNSQAFRAAMCFMLDRRDGENTAFVQFPQRFDDVDPTDSKFGSSMLFINSIPSAANQEWSMASPPAHEESVMEELNNVMKCAYEEGTEFGKEIGWVYNIATEDVVTGFRVHRTGWRSMYCRMEPDAFRGTAPINLTERLCQILRWSGGSLEMFFSHCPLLAGRRLNLMQRIAYTNMTAYPISSVFLVFYLLFPVIWIFRGEFYIQKPFPTYVLYLVVIIAMTELIGMVEIKWAGLTLLDWIRNEQFYIIGATAVYPLATLHIVLKLVLRGNGVSFKLTAKQATSAVNEKYAEMYVVQWTPLLIPTIAVIAVNVGAIGAAIGKAVVGGWSLLQMADASLGLVFNAWILLLIYPFALGVMGRWSKRPYILFVLFMIGFAVVAAVVVAIHAARTGSVRFHSGHSGGASFPTSWGF

SEQ ID NO: 69280 - protein, 913 aa, Zea Mays
MRLSSSSGSVLPAQPGSPEAVEEHKCLNSELWHACAGPLVSLPAVGSRVVYFPQGHSEQVAASTNKEIESQIPNYPNLPPQLICQLHNVTMHADAETDEVYAQMTLQPLNPQELKDPYLPAELGSANKQPTNYFCKTLTASDTSTHGGFSVPRRAAEKVFPPLDFTQQPPCQELMAKDLHGNEWKFRHIFRGQPKRHLLTTGWSVFVSAKRLVAGDSVLFIWNDNNQLLLGIRRANRPQTVMPSSVLSSDSMHIGLLAAAAHAASTNSRFTIFYNPRASPSEFVIPLVKYVKAVYHTRISVGMRFRMLFETEESSVRRYMGTITGICDLDSVRWPNSHWRSVKVGWDESTAGERQPRVSLWEIEPLTTFPMYPSPFPLRLKRPWPTGLPSLHGGKDDDLANSLMWLRDTANPGFQSLNFGGLGMSPWMQPRLDATLLGLQPDMYQAMATAAFQDATKQASPTMLQFQQPQNIAGRASPLLSSQILQQAHHQFQQQPYLQNISESTIQAQGQSEFLKQQIQRSQSFNEQKPQMQHQQESQQQQQPQCLPVPQHQQMQQQNMTNYQSISNALSPFSQLSPVSQSSPMALQTILPFSQAQSFTDTNVGSLSPSNGNTMQNTLRPFSSEAVSHLSMPRPTAIPVADPWSSKRVAVESLLPSRPQVSSQMEQLDPAPASIPHSSALAPLPGRGCLVDQDVNSDPQNHLLFGVSIDSQSLLMQGGIPGLQNGNDSAAIPYSTSNFLSPSQNDFPLDHTLNSSGCLDDSGYVPPCSDNSDKVNRPPATFVKVYKSGTYGRSLDITRFSSYHELRRELGRLFGLEGQLEDPLRSGWQLVFVDREEDVLLVGDDPWQEFVSTVSCIKILSPQEVQQMGKQGLELLSSAPARRLGSSCDDYVSRQESRSLSTGIASVGSVELG

SEQ ID NO: 69281 - protein, 58 aa, Zea Mays
MGRCGGGSGAGAGGGALGGCALLTAALVISTLVIQGAGVAVYLGRFLVVQAVETGELT

SEQ ID NO: 69282 - protein, 773 aa, Zea Mays
MASVEVRSVRKSTALRARGGPSKLQSARSMPLDYRYSDGPSAANGAGGGPAGNGVGRRAVAVEAGKEEKEGEVVRLEGDDADSPYSSNVVTAEEEAGNTGGGGDEVDSAAAATPRRLSPRAAASPTQVDARWGDTSSYGAKKKHRVFCQLRNGDWALCTVLATSGDESVLKVSEGKVLRLKTESLQPANPEILDGVDDLMQLSYLSEPSVLYNLQYRYSQDMIYTKAGPVLVAVNPFKKVSLYGNEYIDAYRNKSMDSPHVYAIADAALCEMKRDEVNQSIIISGESGAGKTETAKIAMQYLASLGGGSGIEYEILQTNPILEAFGNAKTLRNDNSSRFGKLIEIHFSTTGRICGAMIQTFLLEKSRVVQCAVGERSYHIFYQLCAGAPASLREKLNLKKVDEYKYLKQSCCYSIAGVDDAQMFRTVTEAMDIVHISKEDQENVFAMVSAVLWLGDVSFTVIDNENHVEIIADEASKMVAELLGCSIEDLNLALTKRHMKVNNENIVQKLTLAQATDTRDALAKSLYASLFEWLVEQINKSLSVGKRRTGRSISILDIYGFESFDKNSFEQFCINYANERLQQHFNRHLFKLEQEEYVEDGIDWAKVDFEDNQDCLSLFEKKPLGLLSLLDEESTFPNATDLTFANKLKQHLNSNSCFRGERDKGFAVRHYAGEVAYDTSGFLEKNRDLLHMDSIQLLAKCKTFLPKMFASKMVNCSNLCKDWKVQHHTLFVALNQIIYNFLQFMNKDLCFNNLNAVGFSRLSGFQDLGIQQE

SEQ ID NO: 69283 - protein, 54 aa, Zea Mays
MGDHVSGRVRGKVCGQVHSGTRLTDLPYFSACAQYVQMLDTGIRTLILIPIFVS

SEQ ID NO: 69284 - protein, 72 aa, Zea Mays
MEVARSGDFEGRTSGESRRTPGLRPLTGRGSSGADEPAGEDAMGMREVRAQRVSRAGRAEGWPVALGRGRAP

SEQ ID NO: 69285 - protein, 169 aa, Zea Mays
MMQQAQAHTSALAGAPSASAVAPTVAHPHDPVGGDAPPKQVAQAMERLGRAGRFIADIRLGADRLLEALFVSGDAPPYSVRQHVDRMERIIVKEDAAMRLHFQDLRALGRQLEESGVLNGALKAQGNSWGLHMPLVCPDGAVVAYAWKRQLAGQAGASAVDRTSSQGFH

SEQ ID NO: 69286 - protein, 365 aa, Zea Mays
MLGIFSQNEHILIIHATTKRREDFTAYADVCFREFGDRVSHWTTLDEVNVAAIGSYDNGQIAPGRCSDPFGTKKCTVGNSSVEPYIAAHNMLLAHASATRLYREKYQAVQKGVVGINIYTMWSYPLTNSTADLEATQRFLDFYSGWILEPLVFGDYPSVMKKNVGSRLPSFSKVQSEAIRGTLDFIGINHYYSFYVNDRPLEKGIRDFSLDIAADYRGSRTDPPIGQHAPTSIPADPRGLQLLVEYLSEAYGNLPIYIQETGYATTNGSLHDTDRVDYMKTHISSTLAALRNGANVKGYFAWCFLDVFEYLSGFMSQYGLYRVDFEDEALPRQARLSARWYSKFLENKGIHVEDELDDAGSHVEQ

SEQ ID NO: 69287 - protein, 148 aa, Zea Mays
MKSVGRSLGHRRTSSSHNRASRVTGANRIAHQCGISIADPPFVVAEAHHDTNLGTNTPIPFASLCTTSRCFQSSEDGSGATVCGLVGEPPPLAGAAVTGGRRAMVGMRWSSDFKQGARIRGGYRFVLGLVESSDPDRRGGGGELDQPS

SEQ ID NO: 69288 - protein, 180 aa, Zea Mays
MGTAIVSDGGGEGSDGKSVDGWQAEKAVAGNRRALEALRELVAYPFLYARESRLLGLKWPRGLLLHGPPGTGKTSLVRAIVRECNAHLTTINPYSVHKAHVGEGEKFLREAFSEAYSQALRGKPAVIFIDELDAICPRRNSRRENESRIVGQLLTLMDGNKKASKMLPHIVVVASTNRCR

SEQ ID NO: 69289 - protein, 267 aa, Zea Mays
MMKLKSGRRPFYKDVKLVDCRSGSSLPHLAAQAKFAAMNMKTEDVNPRRPVQVRRSRWALGDVTEVLDHNSWRLGKITEVLKNDYFVIRLVGCIQPREFHISCLRIPHDRKQLTVGGRDEEAQDAQDAQWITQYILKCRKWKMTICIAAAAMVPANQVVQHTGRKGYTSQNVLAICDFNMRFTFVVAGWHGSVHDMRVFKDAVDKYGNKFPHPPQASFILWIRDIPTGRVIWRRIEVQSTIFLSFSKVLCQEVKKRFSILHTLRLGM

SEQ ID NO: 69290 - protein, 130 aa, Zea Mays
MGEPKRASQGRENARRATAFRSRRGSRVAHTVGATATATGTCVTTYPRAAGRDGKEESRPRVYPVTSTSAPPVRASLHGRFAFGRARARIGGTGDTAARKNEPDPIELVESSRPLLPCIVSSSAAWLFAN

SEQ ID NO: 69291 - protein, 75 aa, Zea Mays
MASGGCARVPGNLTRLSSSPTGTHHPKDLPHNRYITVITFDTHTLEIERKTFIKYTLHSRTQVLQGRKRCIYYKS

SEQ ID NO: 69292 - protein, 463 aa, Zea Mays
MGSCTSKSALDHRRPARYYTRGRRVHSRRSIMPEAPQSQQLGDASRGRMTGFSMSEIVHVETANRGKSEHSKTFHLTQMEWHHSQRDSKGCSNEDAWFDSVSILEDDSDDEFKSVDGDSDEDEEQAEKQQYASVSSFADALSRIGDICRGVPLPDILALKGDGRRSQQSMPSSFGLKAVLIKDKSDAADDDDDDGDGGGGKETSTPSRLRKLLQSISFNERVQQLTGGSPAKKKSTVIRLSYKTTSSCGGDDYEDGGGGGGGECGRSKKYVVRPKVGQTVPCGGERPATGCWSRMDPSLFKLRSDTFLKDKKKCAAPNYAAYYPIGVDLFACPKKVHHIAQHLDLPQIKTHPKIPSLLIVNIQRRGRLEPGPVLQGVRMLRQGGFRTFQGVYDEVFRGRNREGERVHVRIHCELQRSAEDHGRPGQPGRPPAGLYGEKARPGVQREASPLAAPAQLLRGRGLP

SEQ ID NO: 69293 - protein, 176 aa, Zea Mays
MATASWSPVRSVLLTPCARAQPKSPACSSRPARHSACRARPSTSCSVPGAWSCPSARHDVSNSCTKSFSQLTRPDFTARAVFPSSDSASHRCPIRVNTRPWSCSSSSPTLCCRFDCRRCWVPHCVPAECCLLYLITRACRWLALTITRLLVVTAAHSLFVHRTSRVLAFVVELLNP

SEQ ID NO: 69294 - protein, 580 aa, Zea Mays
MSSEEVAKMEAEMAQMRRCSSPGQGGVPVTVVYYLCRSGRHLEHPHMLEMHLASPNQALYLRDVICRLDELRGKGMATMYSWSCKRRYKTRFVWHDVMEDDMLLPAQESEYVLKGSLLPLRHSTPPIVGAAPPTKDHDQLNIDTTIIPKAPCVKANPHEESPTHSQKGWTTNSSSSPPMVEDEEPPPVALHQGSQPALSSISPSSCCTTGDGDDETASPHPSCSGRPSSPNKSTTKGSSGGTLYPTPSSLALHSKQMMPGCCYVIAAAQDLATQTQGISTGKEIHKDTSCSTDSTPAKATIPTNNKQRDNAGYFYSRSGRSGTLESLIRAEAHGRRVATAKRTQEEDDDKEAVQSFATKLNPANLLMRLVACGSTMSARQHLPACSLMRTAHKPRYLTQHVEFLPSSPVLSPLGTLIMRPRSADEARGASDSGDCNHCRGKLLQTTENRCESGKVMSTIVRPSSHCDHNSVSEKEVPIANLDNLEDGSKLISQKIRMAPCQQHTSGTFVTTDVGGEQKSNTLSRSTSKKMINPSSRPSRVSFHDEREKVIKIEERLASRARVIIQCAPLITETYISAKSV

SEQ ID NO: 69295 - protein, 92 aa, Zea Mays
MIDWGCHHSQRSVLMLWPTDRAFCTAEYSVYRVEFVMGDRMGKAARDNLKNHIFRICASEYEPELCSVCIAFRYFFNANLVLSAAVRTESDE

SEQ ID NO: 69296 - protein, 100 aa, Zea Mays
MRAPAPALRAPAHVMARMFSQLDCVDLGSCSLVCKVPSVQISLQEAISYLRRDILDSSRTVGDEHRRGLGGGPNLPHGVKVLGDQDHVHDVLGSGAWNVL

SEQ ID NO: 69297 - protein, 122 aa, Zea Mays
MITGDQHAIGKETTRRLGMSTKCTLPLLYSEQNKDESLASLPIDELTEKADGLSRVFPEHSVINRVVLTGRAIFQKMKDYTLGFMLLALIWKFDFPPFMVQIIAILNDGSILSPKVQSFLSS

SEQ ID NO: 69298 - protein, 210 aa, Zea Mays
MVQMGVLVPTGDMTVVRRTAQFFLNSFQECLTAQRKEREMATAELGFKKQLTKEEKFEKRKQRLAAIGEDLLAIAADQPFRFPATFTFVVRAFSDGTGKGLDPRFHITEIAKPNAKELLRFNDAGVEIVVKASFNIWCVERHVYSSYDEFLRLHEVYQFVLVFLFVGMPDSNELMFNTEQPTYNFGAYKISKLKKVIKRNDIIVTSSEQQ

SEQ ID NO: 69299 - protein, 136 aa, Zea Mays
MASLTTTAPAASSISPHAGSKRPLLAGDDAPWRATAATSAGQGIRPVPRINHASVLRVSTQEDSAAYALAIMKHPDPIGEGLAMEAFAEAAGPECIVPGQQAPLRLMGLKVWPVDIDMKFLEPFGRELHSMKKVSL

SEQ ID NO: 69300 - protein, 109 aa, Zea Mays
MRGGQGACYIVRKSCDSVPIGDKAGQRGRRWWGSGEPSSVCCLAFSSLVLRLHARSFSWHNSASPAASSLRHVPRSTFASSFTSDEHQPGMCTPLPFALNLGPALHLCP

SEQ ID NO: 69301 - protein, 672 aa, Zea Mays
MDGSGSWDAIDWNQIEDPRPRRSGQAVKESMDDFLLEDEEVLAQGHGVVLLNNRDAGTLSVTNFRLLFVSQAKKCVIELGTIPLTTIEKLNDDVKLQPLPHLSDKNHPRELLQVIGKDMRIIVFAFIPRTQQKNEVFDALRRYTKPANLWDLYAFSCDPSTIKHDSEPKWRLLREYFRLFRRSLPLQGVEEVSLCNEWWRLTRVNSSYSLCSTYPSELIVPRSISDEDLFQASPFRSGKRLPVISWCDPGSGAVLARSSQPMVGLMMNFRNNADEKLVCALSSRTIDEKGSPRKLYIIDARPRANAIANGAKGGGSESSSNYHKSEVLFLGIQNIHTMRESLSRLRDYVDAHGSISSNGSPSAVSVVGDRRNRGSTWGGGNLNSMTSFSSTLGEWLNHIQNILVGASWIAAQISEEAASVLVHCSDGWDRTTQLVSLACLLLDPYYRTFSGFQALVEKDWLAFGHPFAERMGVPTVAENGGSQYELLRQPSLGNLSSSPSRNTLGPPGPSSNSPVQSQTSNNTSPILLQWLDCISQLLRLYPSAFQFSSKFLVDFMDCVLSCRFGNFLCNSEREREQSGVTISCRCMWSHLANLRASGGSFHEHYNPFYDPVNHNGALLPPAAALAPTLWPQFFLRWTCPIESQGGDLESQWHAMNKKYADTMKVSHTSNCY

SEQ ID NO: 69302 - protein, 60 aa, Zea Mays
MVKPCPKEMKCDVELSSYAIRDAEEYKNFCDRQKDQRPQAEEVIAVCHFEHNLTFQTVCF

SEQ ID NO: 69303 - protein, 388 aa, Zea Mays
MNLQEEEIMKFASLGNQGNLQNAVDVLKRSLAIRNKSYKELMVQCNVLGRSESRMQQKLEKAKEILKKLKARVQELEKELEDKENGLLRDLRSSKKFKADHIKSGNVTANSAFTSSSPGYENQTNKLDEVMQDPCNDKTHFDRLKSEAGSVLNAQDNLDNKDVDVIDLEANDSVFGDEQKAQFSAKPFGTDDSTPNSENKSSLCQNDDRHSVASECTTAHAANGGPFLKHREATVKSTFMANIRAKLHIPRESPSVRTNATSSTLESETLTIDGISKQATRLASGTGPQQIHNFNSFSDDFQAPGIPGTDGARRSIGKWCKGPADPSSASGSRGNLIAVGPDGRGGKVKILRDLGRPQDSKSQALWPKAQKVAGRGGQSQIHQFFGKR

SEQ ID NO: 69304 - protein, 798 aa, Zea Mays
MNTMECLDLSMGKDGCSFSQNCVEGFTQGTKSDFFSSINDVETSYPFVKGSSCPTLPNMEQKDGVLENAEQPHLLEMVNLDGTSHSLVDPPLEIKEQGAEAGLFASVEDVEQTHPILTDETSPIWSSEEQVDGSCPASESREQPVPFKVVILGPWHDVPNSILRSRPPSNYSQSMQGSDLYVGNVDVLDLSKEQLDSRLKPEEQGAEDGLFASVEYVEQTHPNFTEEKVDGSIPTPASSEQPDQLEVVRPWDDAPNSTLRSKPPSNYSQPMQGSDLDVRNMDALDPSKEWLDSRLLSNTVEPSSSSNGGGTSVEKDNIEKTERLSGIDTVTPGLDNVQGSNPSAEPSSSSTGEGNSAVEKHSAEMTECLLGMGILNPALHNVQVLSPSTPKECLVSSADKSDVANRSDEINHSLDDFNQSNPKPVLKGRVSKMMCPRLAFQLPKVLPVCEHHKREMSLPSKHVSPRKATKSSFRKQYEGPNRHVSRHTEHQKTKLVMKDRNTGPAHMRSCRPTKQIDCTCSSASLDSSTKTKEVNDAEPRCSKSVKTFENVMAKKRKRPILSYDEDAKAMQMEVRMRRRHRESGVMKLRRSTENSDEAMCPGNSNNQLTNDHTKARKQRRANKDNKTPPVNASVPCTQIDAARLASDQQSFICTRPIDRPYWTGIMKIGQEYISLVAHLSNQACKKVQELSMSLPPLMKVTKHSKLKAWPGRWKASEPTAECVGLYFFSDNMRELDQLVHYLNDHSLVLKYVVGFAKLLISPSVFLPEQCQTFQGKRYLWGVFKRRMNTGRIHHVNAK

SEQ ID NO: 69305 - protein, 62 aa, Zea Mays
MNDSKQQLYGRGVTASGQQILGGASTESRGFPRCFGMPTRSAECAGDGPNNDWHPGPFVSEK

SEQ ID NO: 69306 - protein, 250 aa, Zea Mays
MANSSLYAHLHGPHSAECLLDWRRRASIAMGTARALLYLHRHATPKIIHGSVKATNVLLDSDFRAHAGDFGLARLIPDDGTDHEKIASSESQRGYLAPEYAAMSGKPTAGCDVYSFGIILLELASGRRPVEKSGSGKACGIRSWVLPLARQGRYDEIADSKLGDKFSGPELRRMVLVGLACTRSEPEKRPTMLQVVPLLKGESKETLVKLEREELFSPDSTTVSSQGTPTPDGSTDSAPPLKKDKELVGA

SEQ ID NO: 69307 - protein, 52 aa, Zea Mays
MPRIYEEMPSAFVLHPGSRFLGIDGFVRHPDPASCSLNCLALISFIHAYLNM

SEQ ID NO: 69308 - protein, 495 aa, Zea Mays
MRLFKSTNGGDTCWPLDDNEEGESVSSDDLILHLDSFQEPIMWSDLLNAVQSILPAKAWNSLSPDLYAAFWGLTLYDLHFPKDRYDTEIKKLHENLKQLEDNSDNSSIAISRRKKDKERIQDLLDRLNSESQKHQQHVASVVQRLAREKDKWLSSSPDAMKINMEFLQRCIFPRCVFSMQDAVYCATFVQTLHSLGTPFFNTVNHIDVLVCKTLQPMICCCTEFEAGRLGRFFHDTLKMAYYWKSDESVYERECANKPGFAVYFRYPNSQRVSYSQFVRVHWKWSSRITKALNQCMESKEYMEIRNALIVLTKISSVFPVIRKSGVNLEKRVAKLKGDEREDLKVLATGVAAALAARKSSWLSEEEFGGGHIDLKPATARSVLGNQSADLSMAKDQNARAKSVENRHERSEGAMKPDVQQKKSTVASNGSDILIQSSSVQGKSSVVARAMDEPPKPVSDEGVKVSTKSTSEFEFFCATDKGNTKACWQCWEGNEA

SEQ ID NO: 69309 - protein, 414 aa, Zea Mays
MGRGRWASGIRAAALVLLAVAAAAGAAAGDPDPDELERAFPIVEPDHGHTKLRLSEQGLEAIRRIETPIAVVGVIGPYRSGKSFLLNQLLSLSCDKGFGVGHMRDTKTKGIWIWGTPVEMDVDGSKVSVIYLDTEGFESVGKSNVYDDRIFALATVLSSVLIYNLPETVREADISRLSFAIEIAEEFYGRVKGQDVAFEPAKLLWLIQRDFLQGKSVQQMVNEALQRVPNDNGDKYIDEVNQIRDSLAVMGNNSTAFSLPQPHLQRTKLCDMEDKELEPLYVKRREQLKQLVSSIVKPKIVQGRTLNGKDFVSFLQQILEALNKGEIPSTGSLVEIFNKAILDRCLKAYREKMDGLGLPVPVDKLQKLHEMANGDARILFDKQHFGKHHAAQSALKLEDDIKKDVLCRCTETYF

SEQ ID NO: 69310 - protein, 315 aa, Zea Mays
MGRSALAVRLASLLAFGLVLVSVEASLGDVDPRYRTCVRECQATGIVGENVISHYCRYFCMMQREGERQSLGLSPVKYHGKWPFLRVSVFQEPLSTALSAVNLLMHFTGWLSFFLLVNYKLPLRPQTKRTYYEYTSLWHIYAILSMNAWFWSSIFHTRDIELTEKLDYSSAVALLGYSLILSLLRAFNVKDEASRVMFAAPILAFVTTHILYLNFYELDYGWNMKVCVVMAAVQLLTWAVWAGVSRHPSRLKLWTVVFGGALVMLLELYDFPPYMGFADAHSLWHASTIPLTYLWWSFIKDDAKFRTSTLSKKAK

SEQ ID NO: 69311 - protein, 727 aa, Zea Mays
MTTNTKRAYKLQEFVAHSSNVNCLKIGRKTSRVLVTGGEDHKVNLWAIGKPNSILSLSGHTSAVESVGFDSTEVFVAAGAASGTIKLWDLEEAKIVRTLTGHRSNCMSVDFHPFGEFFASGSLDTNLKIWDIRRKNCIHTYKGHTRGVNTIRFTPDGRWVVSGGEDNIVKLWDLTAGKLLHEFKCHEGQIQCIDFHPHEFLLATGSADKTVKFWDLETFELIGSTGPETTGVRSMTFNPDGRSLLCGLHESLKVFSWEPIRCHDTVDVGWSRLADLNVHEGKLLGCSFNQSCVGIWVVDLTRLEPYTMGTSTKVNGHSELKTVSSGTLPLQNDSGSRANIGRSSVLQNTENNLKTTSGRLSASQNSDSAPKETNSAPSSGLIPSTPHRAGVGSHNRSVGNSAFQSGGTTLKRSSLRNNSASNVHNFSKADVVPVIVPRTSSGGELATDSRSDAADVAPVLPKVTRRVEPATDSRKESNDVELVVPRASSRMEIADLAPISSSKSGRRLESAPDSKEESADTAPVVVSNPRANVRMEIVSDSAPALSKSNRKLDSGTNSKKESADAVIVPRTNSRMEMISDSRREPSAGRISPFRIQSRYAEPRKLAHARTDSNKVDSRSKITETEDFNCQIFLPRRNSVFQTISSEEPREDVKCGPVDRMFLECANQETTAISKFQEQEEQGQVSLIGKGGISPLVMKNQQQAVLHWLLPAIHIHLEEAIKLLKLQS

SEQ ID NO: 69312 - protein, 330 aa, Zea Mays
MAVRATVSRFPATPEALESCAVQWGVAVTPFAAVDERGQPPTTGAGGDRIPRCEHCWAYLSSHCDLERWGWTCALCGTLNGFDDEAERRFQRPDACPELNSSFVDLEIAVDEAGAGGDGVQALPVYVAAVDLACSEEFLELIKSALLAALEALIPGSLFGLMTFSHKIGLYDVQGPIPLVKNVFIPPDLEEDGLPVALEDAMPLLSFLAPVDTCKDRIAAALETLRPTSSWERGAASGHEEDAVLLGGRGFGTAMSALIEYLSSGYGSTFALARVFAFLSGAPDYGAGLLDTRRYGEQYASKGVDANLALLPEQIPFYRDLLLLFSQEFA

SEQ ID NO: 69313 - protein, 1321 aa, Zea Mays
MSDVNLDGISYIIIDEAHERSLNTDLLLAMIKKKLLDRLDLRLIIMSATADADRLAEYFYGCQIFHVRGRTFPVEIKYVPDVSAEASLNSVPSISSVASSTASYVTDVVQMVNIIHKNEEEGAILAFLTSQLEVEWACETFSDPNAVVLPMHGKLSSLEQNLVFKSYPGKRKIIFCTNIAETSLTIKDVKYVVDCGLAKEYRFVPTSGLNVLKVNWISQSSANQRAGRAGRTGAGKCYRLYPESDFGMMEVHQEPEIRKVHLGTAVLRILALGVTDVKCFEFIDAPDPEAIAMAVNNLEQLGAIECLVLASVMANASSIFCRVGTNEEKYKADRLKVPFCHPDGDLFTSLAVYKKWETGYGNKNTWCWQNSINAKTLRRCQETISELEKCLKHELNIIVPSYWSWNPEKPTMHDTSLKKIILSSLRGNLAMFSGHENLGYKVISAGQRVQLHPSCSLFIYGSKPEWVVFSEILSAVNQYLVCVTAVGLNEVLTVHPMSFIKQLEESKLQRKVITGIGNKSLRRFCGKSGQNLQNIISLLRKDCRDDHIMVDLDFSSSEVLLFAKEHDMEKVFCKVNYALELEAKLLRDECDERRPGSSTIALFGSGAEIKHLELGKRYLTVEILHQNARVIDEKELVCLVDSLVPGIANFHKTGNFQTNLDETKWGRFTFLKPDYAEDAISKLNGIEFHGSLLKVSPVSIYSHSGLPFPAVRAKVSWPRKASRGVALVTCASGEAEFIVKDCFALGVGGRYVNCEVSNRYANCVFVTGIPLHVTEPELYDAFHSTTTRRILDIRLLRGQPTASSSVSECTEALMRAISLFMPNRNFPCQKFRVQVFPPEEKDLMMKATITFDGSFHREAARALDHLQGSVLPCCLPWQIIQCEHVFHSTVSCPMRIYNVISQDVGALLESFRSQKGVAYNLEKNENGNFRVKLTANATKTIADLRRPLELLMKGKIINHPDLMLSTVQLLWSRDGMEQLRSVERETGTYILYDRQSLNIKIFGSTDNVAAAEEKLVHALVQLHEKKPLEVCLRGRNLPPNLMKEVIVKFGADLEGLKNEVPAVDLQLNTRRQTLYVRGSKEDKQRVEGMISELITSSDHNAQLSSENACPICLCELEDPFKLESCGHMFCLACLVDQCESAMKSQDGFPLRCLESGCNKLFLLADLRSLLPDKLDELFRASLNAFVASSAGLYRFCPTPDCTSIYQVAAAGAQGDRPFVCGACSVETCTKCHLEYHPFISCEAYKEYKADPDATMLEWRKGKENVKNCPSCGFTIEKSEGCNHVECRCGSHICWNCLENFKSSEECYGHLRSVHLSYADLM

SEQ ID NO: 69314 - protein, 725 aa, Zea Mays
MIYLINMYRRGNGGTLHPLMAPLGAIGAAAASPGRPHPVRGVLRPFSAGGASAPLRGGLGSSLHAADSVSGPLPKPLLEPFTCVEDEALKSGSVRSRRRATDDSAAPRVSGMPLHSATGVNDGGWEVVRPRFWWRKALKNPVRSPRNLQLDVKGTNLFKLKLKGKCYNCLSPAHLAFCCSAPTRCWQCLQSGHKARYCNQKVSQRTFNAAQCFPEPAVLASKSSTYQEVLLKPDKLHKYQDLPHVNSLGHPPPSTKKSYLQAVLEDHGMEARYPGDPRVRPARAFCAVSATGSIRRRRDELIDTAVVCSFDGNSHEVDILSAGDMLREKFSLQHGQYQLVKHFPEQFFIIFSDPRSKQWALDRRSVSYRGRIFHFGDWSEDSYARKTNLEFRVKVRVEGISVHCWGEDVASKALGKSCAIHYVQERTRRRERTRSFDLWAWCSDPCDIPKEVLLTVLEPDRELPPISTPLALVGAQQDAPADLKAGHVYTLRNHIEVVEDLSFLRGRGSRGGPPNRKQRMEFIWSYGAPDSVGEKRERVEAVRGREIARRDWGHDDDDDGDFQRSRRCGNRRHRSLSGWARSSRCRGGMDDCYSSNDKQRHLTPFRRHGWESKLSSRWVPKVKVRSVSFADPIVTAVWPQEDKCGQAEDIGDRSGSMGAVILEPVRSPATTTCKLARHFSRPLTKEQMEAIMELATLGKEKEGIKKKGSKVTPLKAPIIEASEML

SEQ ID NO: 69315 - protein, 487 aa, Zea Mays
MGLQEKHSRSRKEGAALAETAPAQRKSYSFRLFSCQGDISRNVISHPKAAKKEPVVSVEKELDSSELAPAVVPLLERAVSVVSSSDSLSQCEDAVHEVARACSAWDPSLVNLLSCASFIQGLLEVTLTSKDDAVLESAMSIMGKLVLGNEVIRQLVLNADPQLEVFLRLLRSSELFLKAAVVLYMMKPKAKQMLSLDWVPLVLHVLECGDEVQSLFSVRCAPKIAAFYFLDQLLMGFDVDRNVENAKQMIALGGLDLLIGRLGAGDARESRHCIALLTTCVQADGSCRHYLADSLKKEPLVQLLAGNQRKASAASLNLMSELVCLNRTSKIVEFVKELKNSGCLNTMHVLLVYLQQAPLVQHPLAATMLLQLDLLGDPSQYSVYREEAIEAIVAALEHSSQSRKVQEQCARALLILAGRFSSSGEPVAEAWLLKRAGLDDSLSESFRRSEVFKDKSVRAVCTFSSNARKRLRLNVRVFFPNRHVCLH

SEQ ID NO: 69316 - protein, 70 aa, Zea Mays
MPFTIDNNSIVVYRGLNSLFIFKSVPLFAVTPKLSCSHLRLCINLCIIPVYSNADLSEGTCSHIVLQKYC

SEQ ID NO: 69317 - protein, 443 aa, Zea Mays
MDWSLLRTSSFSFNSYTLEIMNASQPNGLVVPDATVHPVNSTSDVIELMRIGHANRAVGSTMLNERSSRSHSIVTIHIRGVDLKTGATLCGALHLVDLAGSERVDRSSVTGNRLKEAQHINKSLSALGDVIFSLPQKNAHVPYRNSKLTQVLQSSLGGHAKTLMFVQINPDVSSYSETLSTLKFAERVSGVELGASKANKEGKDIREFMEQLSLLKHKMAKKDDEINRLQQLKTQTPRVRTAKRADSPLKHSSSSPGISNLGSKIQHRRTVSSGKAMSIASRAGSDTFSDTSDRHSESGSMQSVDDILPRRGIMGLPKLSIGEMGQNSADPELVCFDYADSEERLSDISDSGLSMGTETDVSVSSIVELTRFQEQENIPSTLKEQESARKIPNDQLSKVATRVQKTTVPKLAQTSLWPKLRDPPALRSPGTPPHAVPSTKVEQ

SEQ ID NO: 69318 - protein, 654 aa, Zea Mays
MAAAAPAAGKGKRKRHLSEDDVCLLQRYNPGTILTALQEVAQHAEGRIIDWRAVVAKSATGITSAREYQMLWRYLAYHHDLNESIEAGDLPLGDDSDLELELEPNPSETKEALSEASALAKALISRSSREQASGHRINLDVPALNTQNEKIVRVPSKQLAQSHRVTNVTCPVSNPKQLSHIVPSPTHLDPNGASKKRKKAKAWSKEEDADLAAGVQKYGEGNWEVILHKCNFDNTRTPDQLSQRWALKRPGGSTKPASTKHASVGSEERSATIKALHLAVGPMPVSSALRSGREQSIQHKSTAFAPKMPQVRSAVTPSLAPALALPVQPLRVAAEVQSPLRHGQQAPGQVNQSGPPAGAETKKALGTTLAPVPCDSEENEDGSEFCAITLDDLFPEDAKQPETVDTKAKQPETTGPKAKQPENADPKAMHQETMDPKSKQPDTLKVGILDPKDKDMLEFDQYVASQGAHLNTDDLNKSKCTNSASQAQGLVGSQKNPLKLTPVDGKANPVTAAGRGKPVAAGVASTGKKATIPISHLAAGTPRGIVDTVNANAPIRRTLTRRAAALVPAGCQAPPPKHAIDAKGCQMTNSIATFVSSGVPASSQASTPAKDANKASPPSSSCQPKPDSVAVNGAIRAVKSVAKKGNLPAAAARQ

SEQ ID NO: 69319 - protein, 70 aa, Zea Mays
MEREGERRSKGEDDCDLIVNMKETYQRELTGEHRRNMPETRWRHGEAPVLCGRRHERGGEGDVMCGLFRS

SEQ ID NO: 69320 - protein, 102 aa, Zea Mays
MTVYVEVKEFHPCVCMDLENADLRMMRVMEAYQVKEFHPDVCKDPEIADLRMSERWRSIRDYSVVLCWFTVPQTILKRTDEERKVYSIVEDFELQFKEKEDC

SEQ ID NO: 69321 - protein, 261 aa, Zea Mays
MYQTRVQASTLSFPELISKLPQIGLRGLYRGSIPAILGQFSSHGLRTGIFEASKLVLINVAPTLPEIQVQSIASFCSTVLGTAVRIPCEVLKQRLQAGIFDNVGEAIVGTMRRDGPKGFFRGTGATLCREVPFYVAGMCLYAEAKKAAQHVLRRDLEAWEVVAVGALSGGLAAIVTTPFDVMKTRMMTAPPGTPVSMQMIILSILGNEGPLGLFKGAIPRFFWIAPLGAMNFAGYELAKKAMIKDEKNSSESTREILPRKQ

SEQ ID NO: 69322 - protein, 89 aa, Zea Mays
MKMHVEAEVLSNHSISLFRYVATIHTKIVLSSPCKLGLLYSLVLTLAMPSSLKFFLVPYHRLKQYALYSLIFFCSRTIDVLSHRNHIQQ

SEQ ID NO: 69323 - protein, 100 aa, Zea Mays
METQGAGASSSRSRGAGAPWGRTSARRAPRRARRAEGTSSGRDLGQGGGSGWDGRVEQQGKAAVRRDPNREAPARGERSAGDGAGGHGKGRGSADRGGGR

SEQ ID NO: 69324 - protein, 742 aa, Zea Mays
MPDSPELVVRALGKRLAQPRLGKDALIKLLKQAESALSEFSQSSSLQDPLHALSKSLVQTTLLNHKDKDVKLLVSVCLIEVMRVLAPDPPFSDEILKEIFKLFISIFADLAETSSPFLTRRMKILENVAALRCSMIMLNIGCEDLILDMVKIFFSTVKWLFGKILDPITAVKCVGMHGLQKSVHQAMLSMMTQILNEKVTQSLVDVILRNLVKDDKGASHKLAFNIIENCADKLEPIIHSFLSSCIFNKDMPVTELRRLYHKIILEIFQCAPQILFAVIPSLTHELLSDQVDIRLEAVHLIGRLLALSNLQFGQENKMVFIEFLRRFSDKSAEVRIAAIDAAKACYMDVSRDEAQHILSSLEGRLLDFDEKVRIRAVHTVCDLAKSNLSSSAKLILHAAERLRDKKASVRKNVMHKLLELYRDYCEKCSKGTATVNTHYEQIPAKLIVLCFDNDIESFRPQNMELIFAEELFPFSLSPKERATHWIAFFSYFKPEHIKALNIIFSQKRRLQLEMQTYLSLRARKEESSEEMQKRIRAAFRKMATSFPDISKAEECFENLHQMKDNNIFKDLDELINEGTSFAKGRVTRDMFLKRIGQKHPIYTFSRVLSIKCLHSIFNQEMICAILESLLSRGNELIDYVESACDLLLVIAMVFPSLFRGSEEYLLKLFLEEPILINVKTLQMLAHLAKSTHCLSTNFSNVVYPLLEQKCIEGTRAESKYAITAIAALHSDDKKFAKLFKVG

SEQ ID NO: 69325 - protein, 1271 aa, Zea Mays
MDTPCLVKLLSVLVEIFGPTPLFFKTCKENDEKLDIKSYLEFFNDELLPWCLDGKYSTCNSKIDLLLSLFQDESFFDQWCSIIKCTTTEQKQSVDDKTSNILGRYELLTLLLQKIREKIAGGKLRNLQENGYLLQHLRLDILDSTAASVLCDLPASDCQVSFICAALGGADQEDQICFLSPETVCKILGSILKNLALVLKTSTFEWARLAHSLLPAEPEHLMVPEENSSIINFEMARIAFKVLQGSLFSLWRLEENSVFPSILAALFVIEWECSMSLALDEEKCLESNIEDTEVGVSMCSSSKGCLEEEMHLKVNLAESIHVFCQSLSPSFWDNLHSCTLNRLATILPQCVRNLESFFDVLLSEGEHWPLWLMPSLQNGHLSVKVQLDPDITDEIELKHERFVAFVDRLILKLGFSEVVLGIPGNIQSATSQSIDITSPVSSLSRVWVAGEVLCTWTWKGGCALKTFLPLLVQYMKDESYLEINIVPLLLDTLLGGALMHDSGPWVLFNAWHLSDNEIDKIQDRFLRALVALLFTINTNDCLWRESDALVFFEQLLSNLFIGSSVNRKCLKILPYVMTSIIKQFSALNNGDSSYADLVRKSIQSWLDATISCLSSSSREVPVQDIEDWMQVVLSCFPLRITGGARELVAVVEREISDTERSLMLTLFQKYQIFYGSTASSLVTSGTAVSTTVELLGVKLTAVLVGYCWSNLKENDWHFVFRMVFKCIESSVLLVEEMTDGINDATINQVSSEDALEKLKLVVGTTDKLTLSLAESALVTMCQLNHLCNIQEAENSQCVQLIKSGDYAESNDKMVESVLRLFLASGVSEAITKSCSEEASSVIGSSRHAYLHFWELVASFIKNAPLQSRKSALESMELWGLTKGSVSGLYSILFSSQPIFHLQLAAFSLLLSEPFCQLSLVKNYSMGESCSSAQQSGTSQSAELMPDSDKTVHLREELSDLIEFPTSELLKTDLTARDRVDVFIAWSLLLSHLQTLPASSSIKGDVLQYIQEKHIPVKAAAPNGKKKDTELAPEAEAAAKASKNAIATCSLLPYLESLWPIGTLQMASLAGSLYGMMIRLLPSFVRTWFTTLRDRSLSYSIESFTKQWCSPPLLLDEFSQVKESVYGDENFSVSVNRSAFEIVATYKKEETGIDLVIRLPSCYPLRHVDVECTRSLGISEVKCRKWLLSLTSFVRSQNGAIAEAIRTWKSNFDKEFEGVEECPICYSILHTSNHNLPRLACKTCKHKFHGACLYKWFSTSNKSTCPLCQTPF

SEQ ID NO: 69326 - protein, 1283 aa, Zea Mays
MPLSRHTVGNEYALGGRDLYRAADQHDPEDVLDGVAMAGLVGVLRQLGDLAEFAAQVFHGLYDEVMSTSARGHGLMLRVQQLEAELPLLERDSCQRDYLHVASNRGVDWRSNPRVDQGVVTRGDTPRFIMESIKQCRGPPKLFMLDKYDIGGEGACLKRYTDPSFFRTDSACSTLPHEEGIRDERRPPKAMEIRPNLENAQIFQPPNAADNVSKLETDPSAEAMDEVPTNRRRLKYRQLNGSVFQSFRPLMLNLYEKPSSEEKLVTGGHSKVRISVNGSPESDTEERDTMVDTSVNMGKGKVAVRKNRPVSEEALSRSSDARSAGSSKGYNSELDVYVDALTTVDSEAETDSEHRGHGQCTFDRMDSDNRFSNAQNAMTSRNSNFDKKDRPDVPSANRDMSNQHEEATVSTQNTKPVVVGEHERTSSLEELLGQEKPASWDHERTSSLEELLTEDFNAPESGAREQATEEQSCNGSATGAVSNGTQDITKKTKEVKENSNIATISFKKIASKRSRYVGSMAAKVGILPRKLSKKHDPFSDSLRCMAKQLLELKYDGTKDSDLYDFEANSVGCDVKYQGISDPPVEIKESDVHKFLPDSSYDDVGSRKCPQEEMNHGQEHDAPPTDSPHDSVPDEGNGFQDPNMIYLASIITSSSSQEEEGCASTSLHENSSMAVLNHILEHAQEKFEEHLDKDVNEDIHTEVISENSSGKCEDLKEVSIYSEQVNVEDMEESNKSDVYVLDDETAEYIEEQVVSDGMNSSPVSSKQSDDPCRITPLALADEDDTVACKVIDSPEVDHITLSETFTDIDLPNVVNESVISSEHAMPENEQYYFHPETTFGQDLCLDNNEIVGENGEVPLCSSTTVAITPEPTVNREIEHEFHQAVYQEPSNSFNSSKVFGDPLASDSRDVAPSVISSFDWMLNGAMQQSFNVFPSHPTNGNEQENGSSEDAPPLPPLPPMQWRTNKIQTCSSPLSAKIGRPPRPKPPAKQQESEAAHILQENNLHKGLSLQNEVAQATISSDHETNQLLNMDFHENHHQEGDEYHAQDSNPFPSSEAECLAEIDSVKSENLHPLQLPELIVVPEEAWSEFGNIKFMPEQEGKLQLNNGLSGLAAQKTSGKPDLFAYYKEKELSFAGSDKVANSEENKPNGAVKHMQNLDLPAQQKNDKNDCDRKAEEFSSALEDESSKSPTHTVPKPPRYPLLPVTSHDRSMLRKVPTLVQPSSKLADEKNTLLEQIKNKPVLAKRPNVMGGPKTNLQVVAILERAHAIRQAVADDDDDDSWSE

SEQ ID NO: 69327 - protein, 62 aa, Zea Mays
MPRAVLCLSPSSFRCSLGSCPGPAGRFSPTHLQAQSPVSTLWRALQLHFARSCSLPSSLMAP

SEQ ID NO: 69328 - protein, 61 aa, Zea Mays
MWGNARDCQLGIPGLPEVQPLPVKVIFLRDDDEGLGPSRVISVAIGASHAMCLVSTQQTEK

SEQ ID NO: 69329 - protein, 847 aa, Zea Mays
MILRTYGRRSRSFSDGGGGVSSSQDAFDCDDAADLLVSSASQPLPLPPSQESSSMWDFDEDPPPSPPRPRPEGRRRGARRGGWELAEAPAVAPTATLMEAEEYGEMMESVDEVTFALDGLRPAAQKRTRRASLLALLGICASAERRRVLRSQGLVQQIIDAILVLDIDDPPCAIAAGALLFVLASDVQDNNSLDSETCVHFLLKLLNPPVNVVDAKAPSIGSKLLGISKFQMLNSSNKDADSSSEDILLKVEEILLSCKEIKPLDSDDKKTTRPELCSKWLALLTMEKACLSAVALEDTSEMVLKLGGNFKETLRQSGGLDNIFNVMVNCHSELEKLVKDASTTDVEGKERAPLQSAALLLKCLKILENATFLSDNNKTHLLSLNRKLSPKCPPLPFVGVILNIIELLSALSLLQKPSTVSRKADPKNTKVCNGACSADSRCLNLLNHHGKCNNSKKKSPLLNHHGKCQDCSSTKFLKLNVRKDRSKANSTRGSSGWISIKARTSDWNSREMAKKRRLSENAQTALSNGGDDPFAFDDTDQEPSNWDPFGPKRKSPQKRAKRSNGELVLDDCDTAVTGSPELCQPEGINQSGATSDSKAADESNLLEDCLLASVKVLMNLANDNPSGCEQIASCGGINTMASLIIKHFPSFDFSMDSNNQMKERVSSGDLSSSQNSKSLQIKTKQLRAYELDFLVAILGLLVNLVEKDNLNRVRLANARVSVNLSQSPDTEEVQRDVIPLLCSIFLASQSTGETAEAISPDDEESLLQGEREAEMMIVEAYAALVLAFLSTESMKVRGAISSCLPDNNLKVLVPVLEKFVSFHLQLNMMTRETHSAVTEVIERCRQS

SEQ ID NO: 69330 - protein, 101 aa, Zea Mays
MHYGMINGVTEEGHPIQLPPVADRTFHLLKQKLVQAPVLGLPNDFSKGFVLETAVFMQSKNLVAYLNKHLCPRNQASSRSVWQSLWQLLTNGGHTCSTVKS

SEQ ID NO: 69331 - protein, 775 aa, Zea Mays
MFPPVAVFEPSFGARIMCLDASPEEEILIAGDKKGNITAYPFPKILVLHDSGLMQQKMLPCCRFKGAHGISSVTSVHIEDSTSDHIEIHTTGGDGCICFFKYGRIAQKIEFFGMRQVKELGTIQSIYTNLASESQSSSTYAIGFTSADFIIWDLENETKMAQVSCGGWRRPYSYYLGTVPEYQNCFAFVKDHDIHIHRHWAPTHDKKLLAQVLHLQFHGREVHSLCFINPASHSDPENSSDLLIATGCEDGTVRLTGFLTGSSGKWHSSKLLGEHVGGSAVRATCFIPETYTVTYNSCNYSSNGISDGIAVEKDETFLLISVGSKQVLTTWILQPRNAENRQVYSSGLDIDSKQNSRNLENVDSAMSFQWLTTHMPPKLPRNRLKSGHIKQRVEEGNFSVVQPNMDVMDHMENDWRYLSVTAFHLKHPVLSRLTVCFVAVACSDATVVLRALLLPSRLWFDVAFLVPHASPVLVLRHIIINASHYKDDAGDRYLIASGSTDGSITFWNLTETIHGFMQLISETQPHMSIDYQKRPRTGRGSQGGRLRWRSLSYASKKRDGDMSSSDGSNPGSLNTAENSSEASGVENTQIVVHEASDSSKTEMPSSTQSCDIPELRPMHSLSGVHQSGVNCLHISFSTPDKSYCIISGGDDQSVQRFNFRVISSEDCLTTPARLNSHDNDTLKILYQHKVASAHSAAVKGIWTDGTWSFSTGLDQRVRCWKMGLAGQFTEYSHAIISVPEPETLDVFHDRAKRKYHIAVAGRGMQMVEFSPPEDD

SEQ ID NO: 69332 - protein, 400 aa, Zea Mays
MPDILACRSTQPLEEHVKVKLAQFCHVPIPNIINLHDVTNIWHIPLLLRDQKAHEAILKVLDLQCASKVAREPQLSEWTERVSRCDRLKSPVRIAMVGKYTGLSDSYLSVIKALLHASVALDRKLVVDWVPSCDLEDSTAKETPDAYEKAWESLKGADGVLVPGGFGDRGVQGKILAAKYARENNVPYLGICLGMQIAVIEFARSVMKLHGANSTEFDPTTKTPCVVFMPEGSKTHMGATMRLGSRRTFFQATNCKSAKLYGNACYVDERHRHRYEVNPDMVPEFEKAGLSFVGRDESGERMEIIELPTHRFFVGAQFHPEFKSRPGKPSPLFLGLVAASSGQLDHLLQRGLTSSAGRDICGKGGAQKPKACQNGHVMKPLNGLVHGHYSATRCNGVIPI

SEQ ID NO: 69333 - protein, 59 aa, Zea Mays
MVLQNTTAQARITSIFPQLLCYFAAAFLILSFHRASGVVGPGPPACKLASSNSLSSTIC

SEQ ID NO: 69334 - protein, 68 aa, Zea Mays
MDDSKKVLLVDGGDIDKKLKLATQNLHYVNVLPSIGLNVYSILQHDTLVMTRAAINRIVERMHTPINR

SEQ ID NO: 69335 - protein, 590 aa, Zea Mays
MDDLEHVILLASDSPAAAAASPSIRAEALAFCARARDESPPSSLLRLCLSGIASSPHAQVHFWCLQSLHDALLRRRLVLPDDLALLRSSLLSLAVSSHAGSPPFLRNKLAQLVALLIRLEYPHVYPSYFIDLLPPAPPQPGPTDMFARVLISLDDDLLSQEYPRNSGEAADAMRVKDSMRAQCVSQIASHWHAAAVTLRTADPAAAAVALDAARRCISWIDVGLVANDVFVPLFFDIAMSPGSASPLAAAAVGCLSGVASKRMDSRAKVGLLRSLLAAQQGLGSPDNGLKMAPLVIAYAAEALECHSRLGPSDADGAAALEMLEEVLPAVFAAAESGNDEDVDSGSVLEFLSGYVSTMKAPSEKQLGHLGRILEVVRVQMSFDPVYRGHLDVLDKIGKEEEDLMAEQRKDLIVLFRSICRVAPAAAQLFISGLIVTALSSAEASVEDVEVALTLFFRLGEAVGEEEIRTGAGLIGQLVPMLLTARFSCHTHRLVALVYLETVTRYMKFMQEHVQYVPHLLGVFLDNRGIHHQNAHVSRRAGYLFMRAVKSLKAKLVPYLDTILQSLQDVLSQFTSMNWPNKDTKFPSSED

SEQ ID NO: 69336 - protein, 433 aa, Zea Mays
MLPAVAAASPGLSHLPRYHHLGRRFHLRRHRLLPAIPARLSCGATHARRLLLAGAFAKGEGSSGQDVDHSAGATNSGSAYLGLFVRLLGLDNDTRDREHAVCTLYQYSLGGRKSIDEIMQFPGCIVLIISLLKSESILACEAATGLLRNITSVHIYRKMAGESGAMEEIINLLCKSTITPKILEQCLCTIWNFSIDEKWRYKVLKSDVLMKIVGYLDEEDIQVKEAAGGIISNLALSSSSHGALVEVGVIPKLVHLLQTKEDDYKIIRKEAKSSLIQLATDDCYYSLIIEEGLVRVPLVGSAAYKAFKPLPHSWPSFPDGSKIQRSSHPSKYGATELLLGLSVNENDTKPDEAKINAMIGRSNQQFLARVGAIELDDQGQEESGSEKNDMYTILPWVDGVARKLGLLNLYFSCSSTKMYMLEKLVLMRWKNYV

SEQ ID NO: 69337 - protein, 473 aa, Zea Mays
MKLAKKHYQSQACWKGNFHVTGGLIHTCDGLEAHFPLEISVRVYEASNQMPEILNLEAVPISQLWPKKFKMVPPDIEDIGLWFLSSRQRPHWSFDHLLEKVCSHTGLFTKIGDIELAVFSSKLLTPQDQRKDGKLYFWGVFGKHMRKKSCQPNSHIKNVEISNPSQPNGKSEEVGMKLDMRKGKEKESAKSDEVLDSTGGNDTDRVNGCVAVLEAPDSDPASSCSVPAASSLGGYCHHDSAKNSSSILDSSCQPADGSSVSPDLMLDIPPGISAHIPPGFTKAHCQLQMGTAALSFADRHRSLISDIPPGFTEVHRGLPPAIPPAGPACVSTPGTEKKPFVRFSLNVPRPVGMGAPPGFTPLHAVKKEPGLPDVHETADKHTLHSLAAAAAAVVKPGKGGEMKIADNEVKTEQDENSEERDFPKIRRLSDLYCRPSEDSTEFSQRMPARLPDKFQEQRPEKRLVHPREEVGRR

SEQ ID NO: 69338 - protein, 350 aa, Zea Mays
MVDRSRAVLIGVTAGVAAALVAAAGVLLAVWLYRRRASVAARTRSPESPSATLRAGGAGRASLDSSVSVSVVSESAADWGHPPPHKRAAFWAWRGGAGHNGREPPPLSVSGIPKYHYKDLQKATSNFTTILGQGSFGPVYKAVMATGEVVAVKVLASDSRQGEREFQTEVALLSRLHHRNLVNLVGYCVEKGQRILIYEYMSNGSLARLLYGDNKRSLSWQERLQIAHDVSHGIEYLHEGAVPSVIHRDLKSDNILLDHSMRAKVADFGLSKEEVYDGRKSGLKGTYGYMDPDYMSTNKLTKKSDVYSFGIILFELITAINPQQGLMEYINLRLEGRGGLIGTRYWTRTS

SEQ ID NO: 69339 - protein, 785 aa, Zea Mays
MEEEEYSSETSNEEDGEKEGNAAESDVFRPVDVDPACLPRVGMIFDSEEDAFQFYVTYGCHAGFGITRRSNNTFDGFRYRSTFICSKGGQSRLRSGVTKPARKRGVKTGCKAKMIVKDAHFQNRWEVIVLELEHNHPLDPNLLKFKRHLKNSPFTINPPQICESEGQQSNSALVHSSRVVDTGITSSSTQIEFKAKIDRNRKLKLAEGDLDALLDFLNKMQDQNPCFFYSLDMNEQGQLRNVFWSDAKSRSSYNYFGDVVAINVTNFSDQYDMQFVSFMGTNHHAQPVLLGCGLLAGRSLGAYVWLFGTWLRCMNAKPPHSIITNYCHDVAIAIKKVFPNARHRFCLSHILNVLPEKLEEIDNKDEIISTFTTLAYDYVTMTDFDREWQDTIQHFRLERNEWLSKLYEVRMQWAPVYVKDSFWAGMSVTDRSDSVTDYFDGWLMSGTSLKMFVEQYEEAVKGKLEKESYEDLRSAQMRPPMVTGLPVEDQAAKVYTAEIFQKFFNEIGHSFHCNYNILERNESVVTYIVSEHVDQTNKVDYKVAYDNVQGDIWCLCRLYQSKGILCRHALTVLRQELVLMIPQKYIIHRWCKDCKQTCASISQPVSAGNQELGSYDDLYKLGHLYFAEVVEFGSMNSESKEYALSIMREVRDKVISYEKSLRDQRVDSHVSTANFAYNPVNEDFTDDALPISLSTKGWDLTQGQSKRSRKKKLATPTVLDTLKKKTKRAYNKRRNATANTLNTSATATDGITDGTNVENISFDLSQYNNAPSFHWPESSSRSQLH

SEQ ID NO: 69340 - protein, 772 aa, Zea Mays
MYFAKLDDSPMFRTQIQSLEESAELLRERCLKFHKGCRKYTEGLGEAYDGDIAFASSLETFGGGHNDPMSVAFGGPVMTKFTIALREIGTYKEVLRSQVEHMLNDRLLNFVDIDLHDVKDAHKRFDKASLSYDQIREKYLSLKKGTRPDITTAIEDELHSARSSFEQARFNLVTSLSHVEAKKRFEFLEAVSATMDSHLRYFKQGYELLHQMEPYINQTIGRSSHKQIEAVMQSTSKGKVETIRQGYLSKRSSNLRADWKRRFFVLDSRGMLYYYRKQITRPPAGCSMQRNVNPPEHGSGLLSRLFSSHYHIHDEKSVARHTVNLLTSTIKVDAEQSDLRFCFRIISPTKIYTLQAESAVDQMDWIEKITGVIASLLSSQSPEQCFMSSPKGSGHDRSTSDGSSFTSSVEFEPSVIDDLVLEKYSGNGQHDVIRGTHHHRTSMKPEKPIDLLRKVDGNNMCADCGALEPDWASLNLGALLCIECSGVHRNLGVHISKVRSLTLDVRVWEPSVINLFQSLGNMFVNNIWEDMLPDDNSSADGSDTSQYLSVSKPKHKDVFSAKEKFIHAKYVDKEFIRKRSMDENQLAEQMWNSVAANDKKTAYSLIVRSRANVNLVYGEMPSSPFLTLGKALQQEQPVSPPDGSPKFFDCNSHDKISPREPLSPASTSSRTDDMEDGCEGLSLLHLACRVADVGMVELLLQYGASVNMNDSRGRTPLHHCILKGRHRHAKLLLSRGADSQAMDRDGRTALQYAIDGGTSDEDILALLEDHSR

SEQ ID NO: 69341 - protein, 71 aa, Zea Mays
MQSLVPFSTASSARPMASGPARRCARGSRARRAPSTSLAPPAAVDWSTPSVILTVSRSLRRLAPPTTGGRG

SEQ ID NO: 69342 - protein, 342 aa, Zea Mays
MAPPPPWLAALLFLLLPALLPAVGSVSGAAAAGIFRVRRKLPAGVGGDTGANISALRAHDGRRHGRLLAAADLPLGGLGLPTDTGLYFTEIKLGTPPKRYYVQVDTGSDILWVNCISCSKCPRKSGLGLDLTFYDPKASSSGSTVSCDQGFCAATYGGKLPGCTANVPCEYSVMYGDGSSTTGFFITDALQFDQVTGDGQTQPGNATITFGCGAQQGGDLGNSNQALDGILGFGQANTSMLSQLAAAGKAKKIFAHCLDTIKGGGIFAIGNVVQPKVKTTPLVADMPHYNVNLKSIDVGGTTLQLPAHVFETGEKKGTIIDSGTTLTYLPELVFKQVMDVCR

SEQ ID NO: 69343 - protein, 437 aa, Zea Mays
MLSCYFTTVGFYISSMMVVIIVYVFLYGRLYLALSGLEFAIMKQARMRGNRALQAAMGSQSIVQLGLLMALPMFMEIGLERGFRSALGDFIIMQLQLCSVFFTFSLGTKSHYFGRTILHGGAKYRATGRGFVVRHVRFAENYRMYSRSHFVKGLELMLLLVVYQLYGDVATDSTAYILLTSSMWFLVITWLFAPFLFNPSGFEWQKIVDDWDDWAKWISSRGGIGVPANKAWESWWEEEQEHLLSTGLLGRFWEIILSLRFFIFQYGIIYHLNISAGNKSISVYGLSWLVIVAVVMVLKVVSMGRKKFSADFQLMFRLLKLFLFIGSVGTLAVLFTVLHLTVGDIFASFLAFAPTGWAILQISQASKPVIKAFGLWGSVKALSRGYEYLMGIVIFVPVAVLAWFPFVSEFQTRLLFNQAFSRGLQISRILAGGKKQR

SEQ ID NO: 69344 - protein, 118 aa, Zea Mays
MNSSLHTFAATKFEFHSMFSCTTNRRKLDIAKSSKQHVDGLKAALMLLPVLDDSYTPGVPPASHHVADVKLDEVHNLVGLQINLDGVVGLDERVGVADGAAVVGVQVGDAFHIGLDRS

SEQ ID NO: 69345 - protein, 431 aa, Zea Mays
MASSLLAGRGGGHHHNWGETRAPLEPIPPNPSPSQPHPRADGSKSKPRAAAGYVKFRPASLGHREARALRDRLAVELGQVRALLSRIDTWQQQGPPPRAVLRGAMRKRCGQILSRLRKDKRSVWFNAPVEVERLGLHDYHAVIKRPMDLGTVKEGLAAGRYASHDDFAADVRLTFTNALRYNPVGHEVHTFAGALLAYFERMYKEALVCLEEERKRLEPPRPVAAELPPPPAVEPVEAKAKTRAGNVRMRKPKAREPNKREMSLEEKNMLRLGLVSLPEEKMHNVLQIVRKRNNNPEMLGDEIELDIDEMDVETQWELDRFVTNFNKALKKSQRAAMLNGGVADVTSTAVAEDDTAPVGDVPTLVGNDDAESEEPVKSTTVAEQVDEYVDIGDEMPAATYQSMEIEKDAEGSESRSSGDSASGAGNAHSLT

SEQ ID NO: 69346 - protein, 374 aa, Zea Mays
MLIPPPFAAFQLSNLQEGSMLHGFLMALFSLWGWDHVFPKYNNMVRVILNSMSWVTVLTIVVSLAITSAGQRSCELAIIIFVVATCLIACFTAMLVLEYAKAPLEAKAHAPRAKVLRDGNWRDVHAANLVPGDIIFLKVGDIVPANARILRFQKIDTMTCWAKRSVDCAHGFLLYYAWTVSCGQGTAVVIATGRGIPRSTLRLYPQRYARPGQLKEGAMLTGCFCASLVLVGTFAEIVLRFLFQKQNYRGMPLDAHFMPLIGGIPMAMPTFFYLALALGSVRLCFLGIASRGTVALEDLASVDVILFNMTGTLTCNQPCFVRDKIEMFADSVNKDHAIVLAARASRSQHELYIEPIDAAILSLLDDPEQVAFSN

SEQ ID NO: 69347 - protein, 174 aa, Zea Mays
MYRGTRDGKLVTKASAAGPRSSWRIRRRDLASAILLPFLIPRVNISIAAEIYDASIIRSGVRSVLTKGKAAGVLRLVFHDAGTFEIGDGSGGMNGSIIYEVDRPENIGLNRSIKILRKAKEGIDNVQKVSWADLIAVAGAEAVALCGGPEIPVRLGRVDSSSADPSGKVPEETL

SEQ ID NO: 69348 - protein, 88 aa, Zea Mays
MRALRAPAGSFSLSARSRGRCRLADARDPLALACAGTCSKFIEHFSVRCWTHRGGSCPLNLTYMTIYWSLLETTLCHAFATTCVLIDF

SEQ ID NO: 69349 - protein, 431 aa, Zea Mays
MNSLLRPPLPGPTPRLSARRRVSSPAPVRVGSAVLAGGERRCQRGLAVATSVAPSWMEEAGVAVLEEGGRRNPSVSDSYRAAGLPQPNATVLDAQARVCTGPAQTRPLGEEQAMRVLDTILRSAIGELKEEPVSSAQLGAFFAGMTIRANSFPEATQWSEGERRAMSIFWPRLVQVLPPEVKFIADPEGTILGANGLAEPRYVGQGTGEMRLVGALREVLAGGHLGYEEVQCVLKDILPIGSSSDSTVVSQALLAAFLIGQRMNRETDRELKAYCLAFDDELGPPPVADVKSLTHYGEPYDGNTRFFKSTLFVAAVRACYGESCLLHGVEWMPPKGGITEGQMLKFMGANIHLSPTQAKILLEDETAGFAYLNLQEACPPLYSIIGLREHIKKRPPLATSEKVQQFVRLCLWIPLKIENFTLKEFSEPPDL

SEQ ID NO: 69350 - protein, 809 aa, Zea Mays
MGIPSFYKWVVSKYPSIISPVKDEPEECPDGIIYDNLYLDMNCIIHCCFHPQDQLTHADIDVRPPTTANEVFESMFEYMDRLFRIVRPTSLLYLAVDGVAPFAKMNRIRRGRFHSAMERLAEEPPREISEVSDPNVISPGTEFMEKVSEALEYYIRARFNSDPWWRDIMVILSDASVPGEGEHKIMSFIRAQCSMEGYDPNTRHCLFGHDADLIMLALASHEVYFSILREDVLYQNQEETEGNPKKSFLFLNMWVLREYLEIEFKILDPVCETDIERLIDDFIFICFLMGNDFIPHIPSLKTQEGAVDLLIEVYKTTFNKMGGYITNTDKVKDKYGAYLEVSRLETFFHELSMYEDKIFLKRYDLKQDSLLETYHEMLREAPESERPELRQKLDDLLFNEENPYDSIRLGLPGWKSRFFREHFGAKTSSEIGKLQNDMAQKYLEGLCWVLQCYFADVPSWSWYYPFYVAPFVSDLKGLSRIEISFTVDKPLRPFDQLMAVLPMQSWGALPKCYEKKRDTPFYYPRLVHAKDGKYFLWRGISEELRLSASEMVDRKLTTLESRRNTTRKEKVFLHRSSNSVPHNGGSSSLPHNEVTEQASHCSMQKLPIDSATSGIGGWIAPAYNDGFCDGFFPSPTPNLQDITSDQTISGMFFNPEAANPVPRLLGNVRVPDKTVTGADISKRPLWHTYPGSRPPRIVQRPDTVWKPSTPASPREEHKNAGTGWIGRGRGNALAAAAAAETQWKSSSYSYRRGGGFQRAAMAQSRGSSSSFDGGGAYSFRPLGSAPWTAGDGSRSGGAGHGGIVQPRGW

SEQ ID NO: 69351 - protein, 169 aa, Zea Mays
MKNILLIGNTLNQGTPRGQAVGFRLDSLLKLIETRATSGRMTLMHFLCKSLAEKSPEVMDFHEDLVHLEASSKLQLKALAEEQLAVVKGLEKVEQELTASESDGPVSDVFRKTLKEFIDCSSADVCSLSAFYSEVGKSADALALYFGEDPAKFPFEQGNIHAYRPMEMV

SEQ ID NO: 69352 - protein, 409 aa, Zea Mays
MKRFVYINDDSCRYSYCDNRISNTKYTLWNFLPKNLWEQFRRFMNQYFLLIACLQLWSRITPVSPATTWGPLIIIFIVSASKEAWDDYNRYLSDKKANERKIWLVKDGVRIQIKAQEVHVGDLVWLHENDEIPCDLVLIGTSDRQGICYVETAALDGETDLKTRTIPPISANLSVEQLGKVKGVIECPNPDNDIRRFDANMRLFLPIIDNEKSPLTINNTLLQSCYLRYTEWACGVAVYTGNETKSGISRGAAEPKFTAADQWYLMYPMEVEGPWYDFLIIPLRFELLCSIMIPISIKVTLDLAKGLYAKFIDWDEQMFDWETNTPAHSANTAISEDLGQIEYILSDKTGTLTENKMIFKQCCISDTLYGNDNGDALNGCLLTHYVLYILLRDNVHPFLFSIKACLLCV

SEQ ID NO: 69353 - protein, 456 aa, Zea Mays
MHYRPKNPTSLIGCESKTLMLVHIRPNEDDLCESICTLGFATRVRSIRLENEEPQEVKARKEHLLMELEKEISDLEQECEGIVRKIKKLKETMEHFKGHQPSAEANFDISHPSSEELKTVMPKNTKDSKNRRDVSSRLPRFMKPTASSQHRIDLNKQIPVSNKTKPPVPPKRRPSSVYAESVRLPVNAATWQSECSSECSISMTSDMNWIPSIQDGTECSQDTSEYETKQVIFSEHEKPPQSQVISFEESGEMQDKTKEMGIIDIDSWIHQQIIENTGICQCHTERTLDVIEVNEYETYNSNTASPVQKEFTNGSKPSLDEDSNLNLCPPTQNTEDSKETRAVNQFTKTELYTPPLKELCGSAKIKEHKNEKLGRHGSCRRSLQEELGNCKPEQPDKEPKADPNMQPEIEFHDNKHHIGKLTKFIQALRTAWIGALLGLGTMNLGLEQDFFKSLTL

SEQ ID NO: 69354 - protein, 322 aa, Zea Mays
MAQPQQRVYQAWKGDNRFFFGGRLIFGPNVKSLGVSVALIVIPVAVFCVFVAHHLRHQFHAYDAGYAILVIAIVLTIRVLLLLLTTAARDPGIVPRASHPPEDIHYDNLSLTDTPGILQFPCVKEVIVNGMPVKVKYCETCMVFRPPRCSHCSICNNCVERFDHHCPWVGQCIGKRNCRYFFLFVVSSSLLCIYLFVISALYIKFLMDGDYPTVWKALKHSPASLALMIYCFISLWFVGGLTGFHTYLISTNQTTYENFRYRSDGRLNVYDQGCLSNFQEVVCAKIEPSKHKFRAHIQEEVRGPLANRAGETEEEQVGGPRA

SEQ ID NO: 69355 - protein, 51 aa, Zea Mays
MVDSPPWIRALRNLPAAQGGTAVEANSDEQFLELRLTLSRAKREFTTAMVQ

SEQ ID NO: 69356 - protein, 238 aa, Zea Mays
MAAQGSLVMWRAVFAALGLLMVATLVYTLATDGSPFRLELFTPWMVATLADFYVNVIAISAWVIYKEANWVSSAVWVVLLFCFGSAVTCAYIVKKLLEVTSAGSSQDPLDLLFIRQGNLSQRKCSYVVIGRVIFSILGIFMAAVVTYTVITDGLPFRKELLTPWMAATLIDFYINVFAISVWVAHKESSWISTTIWIVLLICFGSITTCGYIVIQLFKVSYQDPIYHVLLNSHSKYHN

SEQ ID NO: 69357 - protein, 186 aa, Zea Mays
MGPTGSGKTLLAKTLARFVNVPFVIADATTLTQAGYVGEDVESILYKLLTVADFNVQAAQQGMVYIDEVDKITKKAESLNISRDVSGEGVQQALLKMLEGTIVNVPEKGARKHPRGDNIQIDTKDILFICGGAFVDLEKTISERRQDSSIGFGAPVRANMRAGGISSAQVTSSLLESNLLDASLSL

SEQ ID NO: 69358 - protein, 165 aa, Zea Mays
MNHSAIGEQHQPPKPAKVSATPPAPSAERPYVCPYDGCDKAYIHEYKLNLHLKKEHPNHYQDGGPQGAAPSKRSISKSSHRSRPDITARMPPAKVSKRKGGYAAPSPAVNLPEEHLPEEQQWPRKVMYEDDSEETEEEEGGNNVEDRWNYNRVASSDDEETEDEQ

SEQ ID NO: 69359 - protein, 554 aa, Zea Mays
MDWRRAGSPTYGRRRSAGGIYSAPASPAHPLGPAAAASPVHPLAAQSKTRAAAAMAHAMSRAGPRDNDYDNYDDDAGDSATSNGVARYDGGRSPLRGYGYGGRSPLHYAAAGGGGAKDKYFGIALPKLGRNGVDSAAANRTPSTGRSTFAPPVGVSVRPLQAVEIPNGTPRDRRAVYPDPTFAQSTRSRDSHDSSTLTEELEMLKDENVNLLEKLGLAEEKLRQSEARTTELEKQVANLGNGLSMEVKLMKRREEMLVRKEQEIRKALISKNGKSEELTTLQQQLQSAREEASAAVKKLKEAESETQELHTMTRRMILSKEEMEEVVMKRCWLARYWGLAVQYGIYPDISMSKHEYWSSLAPLPFEYVTSAGQRAKDGSEAEGNGLEDVDKLVHDLTVTAGEGNVETMLAVDKGLQELAFLKVEDAVLFALAQHHRTNVAGAADPDIKSSGDEKFTEAFDLSKEEEEDVQFKQAWLIFFWRRAKTNNVEEDIAEERLHMWIDRHGQQPTSHDAVDVEQGIHELRKLGIEQLLWELSRHEANLAKDSPSDVEDLT

SEQ ID NO: 69360 - protein, 305 aa, Zea Mays
MDSMEQPEPKTAGHYYALQVGSVFLTGYYNVLTNQPHLANQFYTDNSSVVRLDCETGRWSFGETVEVINDMMMSMKLSKVEVKTANFLESWAGAITLLVTGLVKLKHYPVRKRFAQNIVLAPKEDGYFIFSDIFKLICDEYDDQYPFADYNCADNMPQVEASYTMAEIGSDYLDGEPEAQETVDPAENHVQHQDYLEYKAGNVIDDETHLEEHIPPFPSSTDVKRDSPLALPHPPSPTLEEPVEEAPKTYASVLRTKSKATLAITESQQAQQLAQQPQSASVHEKSNLDNHRDVSVPEDEGNEHG

SEQ ID NO: 69361 - protein, 156 aa, Zea Mays
MASEAAIARAQCLLRFRRWSPLPLLPLPSPPATTRAASCRRSVRMASSDGSAAALPSATVDVPGAGAPVLVVGAPGLPEADFRNAVESSLFKQWLRNLQSEKGVLTYGRLSLTRVLIQGVDMFGKRVGFLKFKADIVDEETKTKELSLQEGPRLLC

SEQ ID NO: 69362 - protein, 349 aa, Zea Mays
MKDLLLVNLRGNLQIVVQATKEYSEQLGVDACIKLFEQFKSYEDLYFFLGSYLSSSEDPDIHFKYIEAAARTGQIKEVERVTRESNFYDAEKIMNFLMEAKLPNARPLINVCDRFGFVPDLTHYLYTNNMLRYIEGYVQKVNPGNAPLVVGQLLDDECPKDFIKGLILFVRSLLPVEPLVDECEKRRGQCDDELINVTNKNSLFKLQARYVVERMDGDLWDKVLQPENEYRRQLIDQVVSTALPESKSPEQVSAAVKAFMTADLPHELIELLEKIILQNSAFSGNFNLQNLLILTAKAQLREGLVSEAIESFIRVDDAAHFLDVIRAAEEANVYNDLVKYLDQLTCYDC

SEQ ID NO: 69363 - protein, 2316 aa, Zea Mays
MASSPVKFFSVFLAVSVVGWIVFTFASRLLAWFLSRVFSASVGFRVAGFNCLRDVTIKFCKGSVESVSIGEIKLSFRKSLVKLSFGVISKDPKLQLLINDLEIVTRSSSENKKIRKSAKPRSTGKGKWLVTSSMARLLSVSVTDLIIKVPKGALDIKELTVDTFKIAGPNHTLGVKLHLLPLNILLGDLGLTTDPMGSCSLFDAFQSDQASVSNSEKSLAPFVCEDLLVTCNLGHEKEKGIKIINLELKCGYAIANIDERMFHKKRTIPEYNTVSLNTGDSITDTSALKQTSKSKSILPLLKKHMLTFPDKVSFSVPKLDVKFRHLHEGLSVDNNITGIQFTCAKSLPQDDFEEATPHFDVQIDLSEIHLIREGSSSLLEVLKVFTIASLDVPVDPFLPIRAEIDAKLGGTQCNIMLSRLMPWMRLHSLRTKGMKLSKRNSNQEISQKKEMKPILWTCTVAAPEMTVLLYSLNGLVLYHACSQSSHLFANNIASKGIQIHTELGELLVHMEEEYRELLKENIFGVDTYSGSLMHIARMSLDWGYRESDVQDMVETSRNALVFSIDISDMEVKFGFKHLESIVLNLMSFRTLFKSLQLSGGSAKEKNLERKGEKKMKGVKKLKLSLQKFSITYCGDANIISMPIADPKRVNYGSQGGQVIVSVSADGTPRRASITSVLPDCHLRFSASLVISHLSMCIDKERKTTEAELERVKAIYEELPEDRSGVRVTLLDMQNAKIVRRSSGHAEVAVCSLFSATDIYLRWEPDAHLALYETFIRFKHFLHHNVSQNSEKMINTEVASTKSNEHGNITAGFINSQKSNRKGSIFAIDVDMLRVSAELADGVEANMHVQSIFTENAKIGVLSEGLSLTFNGARVLKSTRIQISCIPFSTGSLLDAKIEPSSKRDWVVQGLDVHICMPYRLPLRAIEDAVEDMFRALKLVSSAKRSIICPDEKEKSRKVNSGGSKFGSVKFVLRKLTADIEEEPIQGWLDEHYHLMRNKICELGVRLNYLEEAISGSVDPSNHSSERKVLYNGVEVDIHDTTALQKLQEEIHKQAFRSYYVSCQNMVLAEGSGACSEGFQAGFRQSSRRASLLSLSASDLDVTLTRIDGGEIEMVEFIKGLDPVCQEQNIPFSRLYGSDVSVVAGSLVVQLRDYTSPLFSSLSGKCQGRIVLAQQATCFQPQIHQELYIGRWQKVTMLRSASGTTPAMKMYSNLPIYFQKGEISFGVGYEPSFADISYAFQVALRKVNLSTRASCSGLAVQLPKKERSLPWWDDMRYYLHGKIILYFNETKWKFLATTNPYEHVDKLQIVSEYMEIQQTDGRVDVSAKEFKIYISSVESITKNRRIKVPSRVPRPFIYAPLFSLNVVIDWQCESRNPLNHYLHALPVEGEPRKKVYDPFRSTYLSLRWNFSLRPLQSQYGNGPPPPFYGNNSMLRGIMSGSPCKMTDDDFPTMNLGAHDLAWVFKWWSLNYSPPHKLRSFSRWRRFGIPRATRSGNLSLDKVLVEFFFRVDATPCCIRHAPLSEDDDPAFGLTFKMSNLKYELCYSRGKQQYTFDCKRESLDLVYRGLDLHRPEVYLMRDNNLSSVENVSKVRTMVQQSHGKFVHDRCNMGNFQEKHEDGFLLSSDYITIRRQTRKADPERLMGWQDTGRSHEITYVRSEFEDDSESDHTLSEPSDDDDDFNVVLADNCQRVFVYGLRILWTIENRDAVWSWVGGISKAFEPPKPSPSRQYAQRKMIEERNAEGSKVPQDSSSSIHVGSPSVQHLDASGSSSSLHSKANRSSDVAVNHDIFDDSDKGGTAQYMVNVITPQFNLHSEEANGRFLLAAASGRVLARSFHSVVHLGKEILEQALGTSSAQILELQPEMTWNKSELSVMLKDVQAHVAPTDVDPGAGLQWLPKVLGSSEKLKRTGALLERVFMPCQMYFRYTRHKGGTADLRVKPLKELRFNSPDITATMTSRQFQVMFDVLRNLLFARLPKPRKNSLQYPSDDEDIEEEADEVVPDGVEEVELAKITLEQREREIKLLLDDIRSLTGNGDNGTDHCHSAEKGDCLWMINSGKASLVEGLKRDFANLQKSRIFASSALRKALSNASQSHLEKEKNKTTSCAMRISMKISKVVWSMLADGNTFAEAEINDMVYDFDRDYKDIGIALFTTKYFVVRNCMVNAKCDTLLSAWNTPPGKINMLRVDAKQGAPKDGSSPLELFQVEIYPLRIYLSEAMYRMMWDYFFPEEDDSQRRQEVWRVSTSTGPRRTRRLSSGVDAVTSSSYSVRDHELPGKSSTTVSTSTNVSSWQGVKVSEYKSKYGMWFASRVAPVVFI

SEQ ID NO: 69364 - protein, 456 aa, Zea Mays
MNSVVQGALDTGDFFVSDAEGDPDKPTDGFSSIDQAIGALREGKFVIAVDDENGDNEGDLVMAATLVDQKSVAFMIRNGSGIISVGMEEEDLTRLMIPMMSPITEIEDITAAASTVTVDARVGISTGVSAADRAKTILTLASSDSKPSDLRRPGHIFPLKYRNGGVLKRAGHTEASVDLVALAGLRPVSVLSTVMDPRDGSMAGVTVLQQMAMEHDIPIVSIADLIRYRRKREKLVELIAVSRLPTKWGLFRAYCYQSRLDGTEHIAVVKGDIGDGEEVLVRVHSECLTGDILGSARCDCGNQLELAMQLIEKAGRGVLVYLRGHEGRGIGLGQKLRAYNLQDEGHDTVEANVELGLAVDAREYGIGAQILRDIGVRTMRLMTNNPAKFIGLKGYGLAVVGRVPVISPITKENQKYLETKRTKMGHVYGSDLPGSLPEFANPQEAPTEQDDDDNQN

SEQ ID NO: 69365 - protein, 183 aa, Zea Mays
MGISKVTGIAATAFLVTSVSLCQLGMRIIMLPFLATGIVASIVTVASHDAINLPWILGKNSVGRFPLWSIILFGPFLTLARTYAMVKRYMRKEAVYDKIVEGLYLGGWPFLLKHLPPGNPSVIDCTCELPRSSFVPANEYLCLATWDTRAPTPHQIEKAARWACEKRSEGKPVYVHCAFDRRA

SEQ ID NO: 69366 - protein, 100 aa, Zea Mays
MSAPAAQAVVALALAAILSTPAPQADTFSNVPPTLSGGDGKQERIKHPRSAKALQCTTKCVGTCIRGGGGAPGEGPLNVRRPLVVFKDGFRSRQYCLLFN

SEQ ID NO: 69367 - protein, 821 aa, Zea Mays
MPRPSSRAKAASPPEAVAGASQRTPAPSPSTSLRLGIGPVASDDNRGAGSLDLKQPAAGPRRHSLRLMGAALGLGLGPVSHHDDCGAGCPNLSPPAAVPPRRSLRLAGPALGTPNTLSARDGSSSGFGSGGSEKRSGRARARVPASSLATSISPRTGNSNSDGGGSGADRVSASGDSSGGSDPFTTLRSGFRIAKRRMEAGGEAETGSSRRGQVHNEMLHQHVDTPTKRCKTILVGGVETEHVSDTKGDSDEDCMMLGPSGTELNYVATKTEKGDVDDPANASNGESLQTHNLLPAANGGVVEQLVYASGSPASFEAQVSADMCLKEGSSQCSSRKEGKVKEKLVLGNNKSCAYANVGSAVDTCSHKFNPDSKGKEKMVAEDSLSSLTSSEDEPDFDPVDSKETQLNSGSVSASMESYRRQTVKERAIKLAPKFAFFKADKDEHSEDDDEELEPGPDTEDWPGPFATAARIYEEREAKLRARELNSLKLDESANRVIRWSPSKDRKNLVQAQVAPSLTSVCLNTLAEHSEWIQSLEGVPEELKHKLLKILCDSRKMNTHLLNKLLCDSPTELHLSECSWLSEDDFEKTFGKCSTESLQDLQLDISGRCIPDYILPTTLAKKIKHLEVLSMSRIQSVCDKFVKGLIPVHGLNLKELAFAGCLKLTSSSIKTIGEYCQKITSLDLCNLNRLRDSAMMHLRGCRLIRKLKLQRNAFSDEAVSQYLEASGGCLTELMLNNVEVGDLTALAISRKCYVSLEALDLSFCRELTDEALGLIVDSCPSLRILKLFGCTQVTDLFLKGHSNTSVKIVGIGGSILVQMDSR

SEQ ID NO: 69368 - protein, 676 aa, Zea Mays
MSQDRKEIVVMDSIEKLEKLSGVKVTDLHRHYVDDITIPSKRGPKFGTLKRVDDVFDCWFESGSMPYAYIHYPFENRELFEKNFPGNFVAEGLDQTRGWFYTLMVLSTALFGKPAFKNLICNGLVLAEDGKKMSKSKKNYPSPKDLIDEFGADSLRLYLVNSPVVRAESLRFKRTGVFAVVKDVFLPWYNAYRFFVQNAKRLEVEGLASFSPMEQAVLLKSSNVLDHWINSATESLVSFVHQEMDAYRLYTVVPYLVKYIDYLTNIYVRLNRKRFKGRTGEEDCRISLSTLYHVLVTTCVVMAPFTPFFTEVLYQNLRKVSSKSEESIHFCKFPSTTGERDERVEQSVNRMVTIIDLARNIRERHNKALKTPLKEMVVVHPDNDFLEDITGKLKEYVMEEINVKTVTPCNDPLMYASLRAEPNFSVLGKRLGKDMGKVSNVVKKMTQEQILDFEKSGEISFFGHCLKLDDIKVVRQFKRPENVSEKEIDAAGDGDVLVILDLRADQSLFEAGVAREVVNRIQKLRKTAQLEPADPVDVYYESVGSDKNTLEEILKSQYIRDALGSPIMPKEMAPTDDVILGEESHNVHDMSFVICIARSTPILAPDLLSHASGKSNHVEALRVYLLSRSLSRLKNQFQAGKGMITVDCIEGYPPVSLLLGKHVFLSAGDFYLASRS

SEQ ID NO: 69369 - protein, 472 aa, Zea Mays
MKQARRGSNKLKQWSRAAPALWLLLPLLVLMVLKTNLLPVLARYSVVGSPHIAASTRGASVTSNDVDAPKAVAAPMISSKLICNLSNHQSNTCTMKGDVRIHGKSATVYVVSASTYCPENSTIKLRPYARKWEEQVMLLVREVTVRSSSPPAGGGSAHDPPPPQCSVRHDMPAVVFSTGGYNRNFFHVMTDVIIPLYLTAREYDGHVQLLATDYEPKWIAKYKAILAALSSYPVIDMDTEDTVRCFQSAHVGLESHKELGIVPALSRNGYTMVSFRDFIRSAYSLQRARVTPVSRSTTGRKPRLVMVLRRNSRQLKNEADAIAAAAGVGFEVVAAGPDDVSDLERFPGVVNSCDVLMGVHGAGLANMLFLPHNATVVQIIPWGELRWACRHSYGDPVPDMGLRYLDYEASAEETTLKETYPRDHAVFTDPLSIHHQGFDKMWNIFINGQHVIVDIDRFTGFMKQLYQSITTE

SEQ ID NO: 69370 - protein, 99 aa, Zea Mays
MCNTANYERGWGGDGGLRARLGRRQQTTRVARNVTWRTARAVGGSEETTARDWGGDGTRLAAGRLGSSPGDGGWWRAAAGWFGRRRLGKEDRVLGFALQ

SEQ ID NO: 69371 - protein, 379 aa, Zea Mays
MIHEKRRLAKIKSDYFKQHGGLLLFEDMRSRQGLSSFTHFTQEELEVSTNKFDERNVIGKGGNGTVYRGTTKDGTTVAIKKCRLANERQKKEFGKEMLILSQINHRNIVKLYGCCLELEVPMLVYKYIPNGTLYQLIHGRRDRGVPRVPLALRLKIAHQAAEALAYLHSWASPPIIHGDVKTSNILLDEDYAAMVTDFGASTMAPTDEAQFVTFVQGTCGYLDPEYMRTCKLTDKSDVYSFGVVLLELLTCRKALNLGELEEEKYLSSQFLLLLGEDRLEEILDEQVKGEQSFELLEQVAELAKQCLEMTGDKRPSMRQVAEELDRLSRLSRHPWGRQNSEEILALLGGSPSTASEVELSTSRNISFTDTAYIGIRSPR

SEQ ID NO: 69372 - protein, 583 aa, Zea Mays
MKAERSKAAAAAQRRPLAPSEKNNAAAPAGRRTESPSRFKPVSVSPAAPAARRCGSPSPGPASADGGSATCNGARSAAAPSPAPSSRLKPSAAARSASAVSPRDAAADGHGTPPRARKGKDSDRPWASARSSCSSPLLRPEAEHGQSPATASKVDRLVRGLPSEPVVRLRPGAVAERKTSTSPRPRGRSTSKNNTGDQSQHENARPPESPANSVALADKHWWPGMMAGLSSTTAASAEKASRSDASSSSDASAGRSPPRRTRPCEGAATGKSVKRGPSNETAQIVHRRRKDKAADSSSDASSQMSESSKPTCRPIKQAVSLPVPALRRSSSTTSRSCQTPSRMRPSAAACQSKCASSAARTVVEQPAFSYIIADARKGKKNACQIENVHQLRLLSSRYLQWRFVNAHSEETLSHRNSVESVLYNVWESISTLRDAMAITRDSVRHLQQQVKLYHILTEQICYLEQWPALEEECNGTLVEATEALKASTLRLPVTSGAQADGIAVRNAISSAVDVMQALSSSIYYVQSKVEDRTCLVSGLSATAREENVALDQCRELLATAAKLQVQETSLRTLLMQLRQRSAG

SEQ ID NO: 69373 - protein, 86 aa, Zea Mays
MRTTDPCSPRLARPLTLPEPPAPLVATATRDSRDRRMGSSLLCTLGEPLPSHAPLVPATVRASGHSRLPRPRRTLAPSGSSSSLAP

SEQ ID NO: 69374 - protein, 121 aa, Zea Mays
MTYCRGLAPYAYHGRRPQRRYGGALPLPPRTIVRASAAWCALRSRTRTAWRGTPDGPAARAEMRLCNSACVVEERAIETECWERCGLRAPSASRVPWTGHTRRCYTATPTPAAGQCAHRSH

SEQ ID NO: 69375 - protein, 248 aa, Zea Mays
MLSYVYTVAQSKILYVGHSQGTIMGLAAFTMPETVKMISSAALLCPISYLDHVSASFVLRAVAMHLDEMLVIMGIHQLNFRSDMGVQILDSLCDDEHLDCNDLLSSITGQNCCFNSSRIDYYLEYEPHPSSTKNLRHLFQMIRKGSFAKYDYGWWGNLRRYGQLRPPSFDLSSIPESLPIWMGYGGLDALADVTDVERTIKELRSTPELLYIGGYGHIDFIMSVKAKEDVYVDLMRFLRAQQGMHSSY

SEQ ID NO: 69376 - protein, 579 aa, Zea Mays
MDNSSFFDGLLLSRSDAGSMIEPIVAVPLNDELQESRALVAKAELDVLSKLTDKIRLDLDSIQNLLQETIKLDKIAARAKYSIAYDGTFPDLYLPNFENETVTSATGGSIKQISSAQLPKKAWKLYMPNAYHPLLLQRHQENIHRAKRDVASATAEIRRRRIYGQDIAEEDQLASDLDSMKLRVSQLEKDQPVPVDFMIAEETTVLVITGPNTGGKTISLKTVGLASLMAKIGLYILASEPVKIPWFNAVYADIGDEQSLTQSLSTFSGHLKQIGAIRAESTSESLVLLDEVGAGTNPLEGAALGMSLLESFAEAGSFLTLATTHHGELKTLKYSNNSFENACMEFDEENLKPTFKILWGIPGRSNAINITERLGLPLDIVESSRRLLGTAGAEINALIMDMERLKQEYQQHLQEAQYLLMQSKELHNNLELAQKSIVDHTSAQRKRKARVISEYAVMARSIIRKKFQQFQESAIAERVKEEENAVNDAKSDRVKDPMPANTSAIGNIQNIDTSLGMTANDDEDEVPEVGDSVYVPKLKNEATVVKIDSSKNEVQVQAGMMKLKLKLKDVKVQKRKVSR

SEQ ID NO: 69377 - protein, 100 aa, Zea Mays
MNWGLKEHSRAEGLSPANEKAYRRAMKRACLAAVAVLREVRSLSVYHFMARYLPPCHGLVWRGAWILAADRNCRVRRVQLGSGDWGTLSICVSETWCIIN

SEQ ID NO: 69378 - protein, 757 aa, Zea Mays
MAVAFLLLGLGFLLGLLSLAIAEGLTLLWAIRSLTRRTSASRSTPPPSLPIHPTPARSVSRHSLNRQGFLWMLEQPKDSSINGASPGIRDRKLLVEVFPVKMSATLQGHSLTLSGPDDASQLTIDLLGCTVAAVSASNLPSRKWAKRYPIKLESKESGICRGSKVCYVYADTSWEKESWCKALRLASTTDKDKLKSHEMLTQEFRSYMSSLKAGYPSFLGPSTLSSQEHVLVDNTVKNDGPSKLRGFLKRLVGKKASAKASQESKTGPAPSKQDTSQPSTPSSTMSFNSQLPASPSAKVDEKLADDGTLCWNLLISRLFFDAKMNDEMNKAIRARIQRTLSNTRTPAYIGEITLTDLNLGKLPPSLHRMRVLPLDLDESWAFEVDFECSSGILLHIETRLEVQAPELEKDIMKTDIRGNPNGDASSDFLDSIEQYGNQFGPSEVSDFAAEVNDEADTLRKSKSAGWASTYMSRWRSILNSIADQVSQVPLSLAIKISSVRGTMRIHLKPPPGDRVWYGFTSMPEIEWELESSVGDRKISSSYIASLIGNRIKILVMPNCESFPISWMIADTDDWVPRRIAPFIWLNREPADRRAADTTREMMPGEASTSKAIAKNKSSPLPSTKRITNGSWNKTKIRVDGQEQEQAEASTSSQSWLVSANGDATREQLRMPLLSSSGDERAGPVEEQQASPSAAEEEGDAKKRKRRARVMDLGRRMGDKLEEKGKRFVGKMRENARNNRLLLPDLEQATTPPAPAPS

SEQ ID NO: 69379 - protein, 751 aa, Zea Mays
MDGPASPSAAAETDTRGGEAPSKAKRGNAEEKYQHGQPVYFPEELMDNWVSFSLRGLYYCYNISLQGSCNTTADPTDIILAVKCDMGPDFFRYSFNLGGTDITIKYLYKIHLNQEQVLFARRFQITVLSLLINSNSSEVSNAIKYFREWQVDLGVVYLLLPTASGKIDWCGIKFSTSSAYDVTDKNMRHCHSCKDADILQTMDDPCCRCILQNSVVYAPRERKFYIITGLDLNANQPLDLNNRSAVSCKSKPLLVASGLFTVQNFLYKCYGKRKEPTSVKLPPELCKIVMAPVSANTLFSFSFVPSIMYRIQCLLLSAKLKIQLGPRMQQFNITAMKILEALTTKECQEKFSMESLETLGDSFIKYVTGQNLFNKYKHREDMLTSMREEKVSNPALCQLACKSEIVGYIRGELFNPQKWTIPGFGYDSRGNNKVFFRATNNMYSLKKISIKSKRIADTVEALTGAYLSTCGELAAVHFIKALGMDVELHSKMQVERTITTKSEELIDAESLQTMLKYVFYDTSLLVEALTHSSYNITGITACNERLEFLGDAVLDYILTYYFYRKYPNCTPALLTNLRKASVNNCCYAHAAVKAGLHKHILHSSSKQMVNDLENSGRSFSGPSHGWEAGISLPEDLADLFEAIAGAIYVDSGNDKEVVWSAIRRLLEPLATPGTMEPDPVSELKELCEHKHYPKPSYSPTRDSVAGVTRVVAQVTAARTVYSGTGTGRNQDVAEVLAAKALLKKIKAAARG

SEQ ID NO: 69380 - protein, 862 aa, Zea Mays
MGASRKLQGEIDRVLKKVQEGVDVFDSIWNKVYDTENANQKEKFEADLKKEIKKLQRYRDQIKTWIQSSEIKDKKVSASYEQALMDARKQIEREMERFKVCEKETKTKAFSKEGLGQQPKTDPKEKAKAETRDWLNNVVSDLESQIDNFEAEIEGLSIKKGKQRPPRLVHLETSITRHKAHIKKLESILRLLDNDELSPEQVNDVKDFLDDYVERNQEDFDEFSDVEDLYSTLPMEKVEALEDMVSLAPSSLVKGVAPVSTTAVLSTKSSVATSPTQPTVSTASSQSTSQDQTEETASQESNPEPTPQTPPPKGGNPGPSVPAVPIVVSTGSAAVSVPAETISSPVRLTVPATAATVLSSAIPRSAPENTLAVTSIPANLSTTLKDDESMSVPPRRPSPATEIGIGRGITRGTTSQALGTAPITIGPVSGNGSVSALPAINDLSKINILNTDEKINSDGLSQQLVMPLGSKVQPQQVPRTNDAIGSDSANTNENPILGGRVFSPPVVSGVQWRPQAAAAFQNQIETNQYRGRPEISADHREKYIQRLQQVQQQGGSLLNVSHITGINQKQFPTPQPNPLLQQFNSQSSSISSQVNLGLGVQGSDAGHIKSEDQQILAEDVGVESSATTGANKQTSEDDTKIPYSNPSAPAAENTQLPRDTDLSPGQPLQPGMPSSGVGVIGRRSVSDLGTIGDNLTGTSGSSGHDQNYYLQMLEAAFHKLPQPKDSERAKTYIPRHPAVTPASYPQVQASIVSNPTFWERIGSDTLATDMLFFAFYYQQNTYQQYLAARELKKQSWRFHRRYNTWFQRHVEPQVTTDEYERGSYVYFDFHVTEDGSGWCQRIKNDFTFEYNYLEDELSVQTN

SEQ ID NO: 69381 - protein, 137 aa, Zea Mays
MSLKSEHSSHPTTGIKQVDQITLGQGPEKSEDEGARVGGGRRRAAVRRAIESAAAAVLDDGGGCGACVVVDAVVGGDDVAGVVAVPLHPLLHAAALRRAAVVVPAREHMGVPWIWATLDSLLAILPPFESIVQDLHL

SEQ ID NO: 69382 - protein, 105 aa, Zea Mays
MLRGDLDGDLCFITWDDKLIPKKVDPMDYCNEVTHNGPCCYTRGFRRRENSFRLPEDRREMFELLLHRLRTKSIMEAMDALPSIFGACRLKNRPHCKSTSMSLVF

SEQ ID NO: 69383 - protein, 189 aa, Zea Mays
MRQEVLAARSPQLLNFYVDLVSLDAASKIQLKMLAEEMQAVSKGLEKVHLEYDASERDGPVSEIFREKLKEFTDNAGADVQSLSSLFSEVGKKADALIKYFGEDPVRCPFEQVISTLLTFVTTFRKAHEENLKQAELEKKKAEKEAEAEKAKNAQLTGKNDSKPSNPRRQAKQTLERTRSASRRGRDVG

SEQ ID NO: 69384 - protein, 369 aa, Zea Mays
MAAAAGNGEVEVDVAEWFQAVTEEAITRVTFGRSYDDGRVVFAMQGRLMAYASEAFRKVLVPGYRCVLPDGGASRLRLGFSFKIRRVVCRFLPTKKNWQSWKLGREIRRSLTRLIARRSGMAEEEEEVQAGHSGGFRDLLGAMINAGERKTPAAIPVADMLEECKTFFFAGKQTTTNLLVWATVLLAMHPEWQERARSEVLDICGPDELPSKEHLPRLKTLGMIINETLRLYPPAVATIRRAKTDVQLSDGCMIPRDTELLIPIMAIHHDARFWGPDAAQFNPARFAGGTARAAKHPLAFIPFGLGSRMCIGQNLARLEAKLTMAILLQRFEMKASPNYIHAPTVLMLLYPQYGAPVIFRPRSAHPAAS

SEQ ID NO: 69385 - protein, 233 aa, Zea Mays
MVAETAAIGGRPSSQPSRVRKSAVLSVAASSASSAHQYRASPRLPFGCEREEMGLTFTKLFSRLFAKKEMRILMVGLDAAGKTTILYKLKLGEIVTTIPTIGFNVETVEYKNISFTVWDVGGQDKIRPLWRHYFQNTQGLIFVVDSNDRDRVVEARDELHRMLNEDELRDAVLLVFANKQDLPNAMNAAEITDKLGLHSLRQRHWYIQSTCATTGEGLYEGLDWLSSNIATKS

SEQ ID NO: 69386 - protein, 489 aa, Zea Mays
MAEQEGRDAEAGGDAAAAAVASHTSSMQRVKVYRLADGGKWDDQGTGYVSIDYIEGSKELGLTVLDEDDNDTLLMHNITSDDIYRKQEETIISWRDREAATDLALSFQEAAGCSYIWEHICDIQRNLQFSNLGALEVGPRQSSESLEASRIMHSNDDSFRSANGGEFRELPPVELSNLPFILKTVLEAGITDQMHVAELITQDNDFFPKIVDIFRMCEDLENIDDLHMIFKLVKGIILLNSPSIFDKIFSDEFILDIIGALEYDPEVPRVQNHRAFLKDHVVFKEAIRIENVSVVSKIHQTYRIGYLKDVILPRILDDATLASLNTMIHSNNASVISLLKDDTLFIRRLFARMRSSDISMESKRELVLFLHEFCTLSKSLPLVQQLRLFRDLSGEGVFEIISDVLQSQDRKIISAGTDILILFLNQDPNLLRSYIVQQEGNSLLGLLVKGMVTDFSEEMHCQFLEILRILMDSFTTSGAHDTVSSLRFC

SEQ ID NO: 69387 - protein, 638 aa, Zea Mays
MNLGDLWRVSLAWHLNFSRKELRKNQALESFHEFLKHESEVPPLFLNVQPDHHILDMCAAPGSKTFQLLEMIHQSKELGLLPGALDQLGPVNGSVWPVGRGAGMDCSGSYKDPCKLQKLEFDRILCDVPCSGDGTIRKGHDMWRKWNSGMGNQLHLLQVNIAMRGIALLKVGGRMVYSTCSLNPVENEAVIAELLRRSGNSVELLDVSSELPELVRRPGLSTWKVQDRESWFQSHDEVPHNRKNVVFPSMFPASNSTEESHTVCGDVEVNINNMNSFSRNINIEETSKLNQDMDGVSVSPTKILECTSNIVSSKFPLHRCMRIVPHDQNSGAFFIAVLHKLSPLNGSQIKDTKIQHRLGTDRTIQFQKEPKPETRPYETTLTRRQHNVSEVDDTEVLGRGQKLGTDSQTSKDKNSSEVEIVSILAESGDRMELQKQSRWEGVDPVLVLNDEAVIKSIQSFFGIKESFPLEGHLVTRSPDNARRIYYVSKSVKEILELNSKVGGQLKIASLGVKMFERHRSKDPCPCAYRLSYDGLSLVLPSISKRILYASALEFHRLVQYRSISFAHFTDTRFGEQAASLTPGCCVVVLLEGNRRVDSICKDPSTIAVVCWRGKGTINVMVSPSDRKDLLERMAYRFG

SEQ ID NO: 69388 - protein, 359 aa, Zea Mays
MIELSLSGKRALEFDGDQVLDVGQQHHVIAIFVGTLVKLYKGEYTFLSGTSACRWYINENDIAEIKAFQKSLPSEPVPIKKTYLQNDDATHKFEEKSLEQLKHVDPFLDMGQRYQCTATIIGITENQTWCYKACKICNSAIIQKENGYKCTKEGCPSTQFEWKYKIPFIASDHTYNLEFMFFEKKGMELIGKSASTLRKQYEPKEIPPDITSWIGYKFTFVVRVLSKKSVKTIDPSFEVLMIKEKYQKEPIISFISSSGVVPAESSSSTMAEYKELPLLVPITSKDIEKKERSTSQPEHTEETQDMDIEPSGIWEESQISNKRSFGDPNYDKQETTDDKDDLPQFKKIRSTHSQGKSKK

SEQ ID NO: 69389 - protein, 72 aa, Zea Mays
MGIIIYVRVAGMSNILNPSHVTGMGAGLILNSRVRVSNMLSSLRMCRYNNRHITSPLHLNKLRARVSHASTS

SEQ ID NO: 69390 - protein, 66 aa, Zea Mays
MWTTSSGAAAAWTWSRVTAPRYPSSNRRTSWSSPTSVTPGLFWAPHPTMAPSRRPCHRPPEVQPST

SEQ ID NO: 69391 - protein, 1116 aa, Zea Mays
MSASVDAASAVAVPAVPPAVEEAGGAVEQARTLIAALNLLSRNLPLPPDVMRAVSSIYHDGGAGDRAGEEEKGGDEEMPAADGAAEGNCSVYAAGGATEGTTLIEELEDAILKNQRTPITYSELAAIREGRFNASIQHRLAELEGLPSTRGEDLQMKCLLELYGLKLLDLQKKVRSDISAEYWLQKKCAYPERQLFDWGMMRIRHPFSMYGIGDSFSVDVDDVHRRKRFTERMSRLEEEGKNQADIRKRKFFAEILNASREHQVQLGTTFKQRKQRNDGVMAWHVRARQRITRQEKSRINLLKTGDQEAYMRMVEESKNERLKMLLDKTNELLEGIGKAVQRQKDAEHVSKPEGGSEVPKGSESEDCSQISGIKSESAEESPSDDDGDLPGPADESKFNAGRRLDFTVHSIEEKVTEQPSALEGGELRPYQLEGLQWMLSLFNNNLNGILADEMGLGKTIQTIALIAYLLEKKEVAGPHLIIAPKAVLPNWSNEFKTWAPSIGTILYDGRPEERRLLRDKNFDGEQFNVLLTHYDLILKDKKFLKKVHWHYLIVDEGHRLKNHECALARTLVSGYMIRRRLLLTGTPIQNSLQELWSLLNFILPNIFNSSQNFEEWFNAPFACDVSLNDEEQLLIIHRLHQVLRPFLLRRKKDEVEKYLPVKTQVILKCDMSAWQKAYYEQVTSREKVALGYGIRKKALQNLSMQLRKCCNHPYLFVEHYNMYQREEIVRASGKFELLDRLLPKLQRAGHRVLLFSQMTKLLDVLEIYLQMYNFKYMRLDGSTKTEERGRLLADFNKKNSEYFMFLLSTRAGGLGLNLQTADTVIIFDSDWNPQMDQQAEDRAHRIGQKNEVRVFVLVSVGSIEEEILDRAKQKMGIDAKVIQAGLFNTTSTAQDRRALLQEILRRGTSSLGTDIPSEREINRLAARNDEEFRLFEKMDEERRLKENYKSRLMDGNEVPDWVFANDNETLRKKTVADEFRNIIVGSKRRRKEVVYSDSFGDQWMKSDEGFEEIAKMTPRVKRTAYSPDIQVEYNERRKRPKSVENSADGASNPTRTPDKGRAGVSSYSKDETEDDGEDEVITSGLQKGNSFTWKTLGRKRSSHLSSSSDSKGRPSF

SEQ ID NO: 69392 - protein, 351 aa, Zea Mays
MRFLKGSKVEVLQEADVPFGSWRPGEIVSGNGHAYFVRYDESPVDSSVAVERVPRRLMRPRPPADDPVRWSLGSIIEAFDSYSWKVAEVVRVLGKNQYLVRLLGSSLELSAHASVLRMRKLWLDDIWIVTQKYSARCLDGGAFRGQSKDKNLDHNFRMDSRQLENQNAFEGDTSRGIKRKSSAISTHPQCSEITKRLRTPNRDGRYSKLVDRSFSPLAEKVDDVDSPCIILRGKCIHAGHKWHTGTTEEFSDTESISSSVGSSSPNSTPHRSQHYNLVYQSGDSCSRTDDDEASTSERETSEHDNNGSREETHVLELHAYRATMLALHACGSISWEQEALLTNLRAKVGGL

SEQ ID NO: 69393 - protein, 838 aa, Zea Mays
MELVLVKPAAGALVEVGSGSVAGAGSIPAMVAAQQEILHEQVDQLQRLVVAQCRLTGVNPLAQEMAAGALSIKIGKRPRDLLNPKAVKCMQSLFALKDILGKKETREISLLCGVTVTQVREFFTVQRSRVRKFVRLSQEKALRIETPKEQDNSYSINTEQIPPDIEAQAEVIEPLRTLEPVVLQSSLQPTCVPQISSQSMELQQSDLQHMEVFQNSLQQAEAQHNIAAPIMPSGAMVMQPTDAKISSDSVQKEVKQEGVHSGVASEDKKFLESIFALMQKEETFSGQVKLMEWILQINNVTVLSRFVTMGGLTIMSTWLSQAAIEEQTSVIHVIFKALPVHMSVVLQTINKLRFYRTQDISSRARNLLSRLSKVLVRIQALKKPQKDLICKQRISEILRDESWKSEVDITEEVLALTDGANESRKPEPRKTPMLLTASAIETNKRSSVQTKSKQKRKVLLVEQPNKKATWKNANSVRNTSTNNSRPLSADDIQKAKMRAMFMQEKRGKIDINKLSDKPQAMDTKKAAGLVNSNPSAMPISPHTSAAQPVDPSPSTSKQSTDPQPDNTEISGGLKLNIGSKNNVIEKLDCKRVLWQIPPAVWIDPSWSVGAGDNSKELEVQTQRNRREKETFYTSQKDVPMNPKDPWDLEMDFDDSLTPEVPIDQVPDVDAMETESVGAAPSAVAPVKDKQIESASSTSGAVADDEEANTDYELLTVLLRNPELVFALTSNKGENMPNEQTIALLDTLKQTGLSLSELVNRLGNGAGLPKEPEPEPEPIPASLPSPTPPDRTSRAVWIPEHAMQVRAAPTLHLPSRGSTPPVANAVQQGFSNVSNMFPL

SEQ ID NO: 69394 - protein, 436 aa, Zea Mays
MNGNNRTSVLNTSISSVTSRPTTPSRRSSTVGTPKHSAPAARPVPARSSTPVNTRPSTPAKTRPSTPTRTRPTAPNSSTDSAAAKTTFTHNARPSTPNSRSRIVPNSSSSATHVISRPSASLSATSRPGSSSGNVPGISRATSLSSSSVPSMSRSSSRSSTPTRQPAIRSSAPAIGRSPSVGRTSSINSFTTSSRSAASTGRNSAPSSAPSSRPSSPNPRPRAPVRPLDIPDFPNETPPNLRTKLPERPPSAGRSRPGMALGIRSTPNTEPSAASAPVKKISVPAVSRSKFSDASSKTSTLTNGHQNRQADRSNIDSQANRPSRPSTGTTDNGFGRSISRRSLDMAIKHMDIRQNLGGIRGTSLFPQSIRSAAAKVRPARASDPGHGISNGDQRYSDNGKQRERTPLPGTQTGFSHVMVAAQPIRQTGGASGPRRP

SEQ ID NO: 69395 - protein, 277 aa, Zea Mays
MALSCYLLAGARAAASPSFSSSAAIRRRDHRLLTLSVVPLSLSQRCRHGLRVCCASSTSSSSPPPATPEEPDDYELLDTAGNCDPLCSADEVSSQYFEANYKPKNDLLKALTIIGTALTGAAAINHSWVAANQDIAMVLVFAIGYAGIVFEESLAFNKSGVALLMAVCLWVIRGIGAPSTDVAVQELSQSTSEVSEIVFFLLGAMTIVEIVDAHQGFKLVTDNISTRNPKTLLWVIGIVTFFLSSILDNLTSTIVMVSLLRKLVPPSEYRKRIKRIS

SEQ ID NO: 69396 - protein, 129 aa, Zea Mays
MATGPRSLHALLGGGAVADLLLCRRRNASAAAVVGATAVWFVFERAGYSFPSVLSNALLLLVAILFFWAKSALLLNRPLPPLPNLEVSDAVVEKAADYALVWINRLLAVGHDIAIKRNRKVFIKVSLFL

SEQ ID NO: 69397 - protein, 257 aa, Zea Mays
MAVRNVSAGLKAREAIVAKIPVARIDVLELDLSSIASVRRFASNFDSLNLPLSILINNAGVMTRSCTRSCDGLELHFATNHIGHFLLTNLLLENMKKTCRDSGIEGRIVNLTSSAHSITYREGICFDKIHDPSSLNDFVAYGQSKLANILHSNELSRILKEDGVNISANAVHPGVIMTNLFRNRTIVSALLNSIGRIICRTVEQGAATTCYVAMHPQVRGISGKYFTNCDVANPSSQASDAELAKKLWQFSLQIVSS

SEQ ID NO: 69398 - protein, 876 aa, Zea Mays
MSCRAAPWSRPSHIAGPRVPTPARPRFALGSRNLWKNSWTIGAGVSNMFALPSTLFRCMASSGSGDGDFARSTLTDEAAPFPLYSWPDKQRPRVCILGGGFGGLYTALRLESLVWPNDKRPQVLLVDQSDKFVFKPMLYELLSGEVDIWEIAPSFTELLKNTSVQFVRDSVKLLRPSDHLRRKPGEPCTGGVVHLESGTVIEYDWLVLALGAEAKIDVVPGSAEYALPFTTLEDALRVESKLKMLERKRFGKSSPTIEVAIVGLGYSGVELAATISERLKNTGTVKAINVQTTVCPTAPQGNRDAALKVLESRNIQLFLGYFVSCIKEAPTSDESSSTVTYSEVDGDHRKLILDLQPAERGLKGQTLDADLVLWTVGSTSQIPRLQPPDAPYVIPLNGRGQVETEETLQVKGHPRTFAIGDSAALRDPSGKLLPATAQVAFQQADFAGWNLWAAINDRPLLPFRFQNLGEMMTLGRNDAAVTASFIEGLTLEGPLGHAARKLVYCLRMPTDEHRVKVGISWFTKAAIDSLASVQNAVASSFPPPTQMGDSTATNPSSPTAAMDPDSEVVFDFPPYLCQYKSGRIHRPGGAPTVPAGTDPATGVVSKDIRAGPASARVYLPPGAAGKIPVVVYFHGGGFVVGSPARPGTHNYLNDLVARSGAIGVSVYYRLAPEHKLPAAYDDAWAALRWAATLGGGEDPWLLEHADLSRVFLAGCSAGANIAHNTAVRASAAGALPDGVTIRGLAVVHPYFTGSEAVGGEIAFGPEIRPFMDRTWRFVVSDTVGLDDPRVNPFVDDAARRASAGIPCQRVLVCVAENDFLLKERALWYHREIKASGYAGEVELFESKGVGHAFHFDMLDSEQGVQLQERIVAFINK

SEQ ID NO: 69399 - protein, 812 aa, Zea Mays
MRSEGGLEYGNADLPCELGSGSGGSALSADNTAGGGLIVIGSMKWPLSRLLVYGSLNSDGESHRGTSGNSNGTFKGGVGGGSGGSILLFLQWFLLEKNSSLSASGGNGGVYGGGGGGGGRIHFHWSYIATGDEYVHIASVNGTIVSSGGSGKNDGHCGEDGTVTGKKCPKGLYGTFCTECPVGTYKNVVGSNSSLCIPCSVDSLPNRAEFIYIRGGVTELPCPYRCISDKYKMPNCYTPLEELMYTFGGPWSFSIILSLTVILLALVLSALRIKIGESDITYRATNAIHNDGCSFPFLLSLAEVPGASRAEETQSHVHRMYFMGPNTFREPWHLPYSPPDAIIGIVYEDAFNRFIDEINLVAAYEWWEGSIHSILSVLAYPCAWSWKQWRRRKKNHRLQEYVKSEYDHSCLRSCRSRALYKGLKVGSTPDLMVAYIDFFLGGDEKRLDVASTIQKRFPMCLIFGGDGSYMSPYYLHSDTLLSNLLGQYVSTAIWNRLVAGLNAQLRTVRQGSVRSTLGPVVSWINSHGNPQLERHGVRVELGWFQSTASAYYQLGIIVAVNENFYKNLRHHEHATEFCERSRKNVAVPLQDFNQANLDQPCTSYAVSRKRLTGGVNGGIINEGTLKSLHYKRDYLFPFSLLLRNSRPLGYAETLQLLICIVLLGDFSITLLMLVQYYWISVGAFLAILLIPPLALLSPFLAGLNALFSRGLKRSSVTRIFALWNITSVVNIIVAIIYGSLYFWLSSLAVSSVHQVYNTKSFKSREDNEWWILPTILFLIKSLQAGLVNWHVANLEIQDYSLFSPDPDRFWAM

SEQ ID NO: 69400 - protein, 499 aa, Zea Mays
MPPLHVPGSSTPRKFYHLVLFHVHPFWIQVLYFLLISVLGFLMLRVLPMKSSSVPRPSALDLLFTSVSATTVSSMIAVEMESFSNAQLLLMTLLMLLGGEVFTSMLGLHFTCTKLRNKRETPHNNLHGNSLEQSRRRHRPMEMEAQAAAVQMELAGFNKDGHGDFASMARLLMFIVLGYILVVHIAGYALILIYLSVVGSARAVLVRKRISLSTFSVFTVVSSFANCGFVPTNEGMVSFKSFPGMLLLVMPHILLGNTLFPIFLRLSITALERVTRWRDLCELLRDRGPGGGPAAAAAAAAIGYDHLLPGPRTWFLALTVAVFLAVQLVLYCAMEWGSGGLGGLNAFQKLVAAVFMSVNSRHSGEMVVDLATVSSAVVVLYVLMMYLPPYTTFLPVAVEDDQQQQNEAQPHDNSTSKSSTSISIWHNLLMSPLSCLTIFIVVICITERRQIARDPINFSVLNIVVEVISAYGNVGFSTGYSCSRLKKFSMLGGQAWRLN

SEQ ID NO: 69401 - protein, 65 aa, Zea Mays
MLARRCRPSSSSSSPRPRVVLGRTQLLVVDAPASCQVIPHVHLHMMGGVGGNVLARYSFGVRGCA

SEQ ID NO: 69402 - protein, 552 aa, Zea Mays
MIRLHMTSSSSRRVGLWQLMMKKLGSFSNIPQSSVFSLLDMLAISSAFSNSSWQVVGTLFTHHQKCVLVDTQARGNKRKITAFIGGLDLCDGRYDTPEHRLFKDLDTVFQNDYHNPTFSAGAKGPRQPWHDLHCRIDGPAAYDVLTNFEQRWRKATKWRDRFRRVSHWKDDALIKLERISWILSPSPNVPNNHPSLWVSKEEDHENWHVQVFRSIDSGSLKGFPSDCKAASKLNLVCRKNLVIDKSIHTAYVRAIRSAQHFIYIENQYFLGSSYAWPSYVNSGADNLVPIELALKIASKIKAGERFAVYVVIPMWPEGVPTAASVQEILFFQAQTMEMMYKIIADELKATDNKDMHPEDYLNFFCLGNREEPPSNGSPESEKSTDKSAAALASKYRRFMIYVHAKGMIVDDEYVILGSANINQRSLAGSRDTEIAMGAYQPHYAWSTKNGHPHGQVYGYRTSLWAEHLGTVDDRFKDPSSLECVRFVNQIAVENWQRFTAEEMSTLQGHLLKYPVKVEADGKISPLSDQECFPDVGGKILGAPTSLPDSLTM

SEQ ID NO: 69403 - protein, 922 aa, Zea Mays
MGSLRGAAASSAAPRAGDLVTTQVSLGGFDATVKALDLADFLELNAGSVWRCRLKTSWTPPDAYPDFLLPTVTSAAAPPPQYDRVPPHAFVHFARPEGARAAADAAGRSELILSGKPLRAASAQDSSLRASRRRSVSPFRFPGSRLEVGDLPASDAFIAAWRGPASGLEFSVDPFDGSCHFIFARDTAFKVREFRESVVMRCDVKLQFPVRDVAEVRVFRLDCSLLIRLSAAPLVCYRTADDDIHVSVPFDLLDDDDPWIRTTDITPSGAIGRCGAYRITFSPRFWPKMERALTYMRDRRVAILDCVGGWGARRGLTVRDEPEFGERMQDLFFCVQHAEGLKFPVLFLVNALVHKGVISQHHLTPEFFGLLQRKEDDVNVAALREFWGDKFPVFDACGRLKNLQDRVARYLKHLRNKIGDVNSEVRRLVITPTKAYCMPPEVERSNRVIRHYSEVSDRFLRVTFMDERMQMLNSNVLNFSAAQIVKDLMSNSFLHKTTVYKRVKTFLTEGFHMCGRKYSFLAFSSNQLRDRSAWFFAEDRTTTVETIRKWMGRFTSKNVAKHAARMGQCFSSTYATVVLQPHEVNECLDEVEHNGYIFSDGIGKITCDLALEVAQKLQLTDNPPSAYQIRYAGFKGVISVWEGKNDGIRLSLRPSMHKFESNHTVLEVVSWTKFQPGFLNRQIITLLSSLNVPDAIFAQMQEAMLSNLNNILSDSDVAFDIVTASCAEQGTTAALMLSAGISPGTEPHLKAMLLAIRSSQLLGLLEKTRIFVPKGRWLMGCLDELGILEQGQCFIRASSPSLNNCLVKYGSRLSAANTNAETILGTIVMAKNPCLHPGDVRILEAVDVPELHHLVDCLVFPKKGERPHANEASGSDLDGDLYFVTWDENLIPPGKKSWNPMDYSPAEAKQLPRAVSQHELRH

SEQ ID NO: 69404 - protein, 596 aa, Zea Mays
MYEQGAGRLDLWQSYEILKNYQPRASIFPTMLDFTDCPYFWPFCRQPMYAGAMPVIFNATILNGMGVIGYVKDQPLWQPSEDIGNLLSVHFTYSDVIWPWTGYLALHLQVKDEGSQFSGIISGNVTLTIYTPAAHGESSPRSSTCILHMKVKVVPTPVRSKRILWDQYHNIKYPSGYVPRDSLNVHNDILDWHGDHLHTNFHILFNMLRDAEYYIETLGSPLTCFDASNYGTLLMVDLEDEYFDEEIQKLRDDVIHKGLGIAVFAEWYHVDTMVKMTFFDENTRSWWTPITGGANIPAINELLAPFGIALGDKILTGDFSINGEQTHYASGTDIVQFPAGGFLHSFQLQENSKTVQDHIGTLDTESTQGKGKLSSILGVIEAGEGRIAVYGDSNCLDSSHMVTNCYWLLRKILEFTGNRVKDNVLFSEAAQLKFPVFENIHHPSRRTDVNFSTYSTVVGKELICHQDSRFEVWGTKGYGVQPIGTSRKLPEYQMHESSSSPNVTIQIAGSRQDKVERLQRNLSIPNAAKFDDKRDYFGFIGHEEVDIGMLMASQWMIPCFAATACLMLYLSCRVQQKRRRRRKGSVASANRLTSMV

SEQ ID NO: 69405 - protein, 319 aa, Zea Mays
MCLIPSRGRHCLGHRCIPRPGRLHSGSSTAAKVTAALPTRIPGLYTMCYGVECTAASVAPVSSSPTARCTAVAASSSSPHHRATTTMATRSWPLQHQPSPVRQPLDERNARVLVLGARIALALLQRHATAAREAAERLAMEARDARARAHDALIVAFDLDAEEDLSCVVPQPTENDLAASEEEEEEEEEDSEAETDEGEVMLVRRNVMPPLVTPTIDTGGSVVPLASAEAKHMPPLSQPKLLFDLNENAAENEIDDAQAEPMRHQALNSFNVKEVAMAAGAEATRASPSTPQTLQLFPITYQDIVPRTLQLFNDDDEEM

SEQ ID NO: 69406 - protein, 227 aa, Zea Mays
MRLMLKNQIMVFNRLLQDQFEIMNKEFSSGIPSMSLPNDSNSNLLKQDSCFLPETAPGNAMPDGIMHNGSSSGIINDTPSGDQLLNASKDLHGLHSQIDASTSLQSDQNATAVLYGVDNETSATIKTESCYSSNADFAFCGNTFLESCQSIGDASGGGSFSSSELNGQPLNDSILDMESSSFSFLNQMPQSFMFSDLADDFNQNAEITPFLTPETNFSDSTGGDHTG

SEQ ID NO: 69407 - protein, 2209 aa, Zea Mays
MDLAGMKRRELQALCKRHGLPAGGTNADLVGRLDAVLSGPAVVEEEVAGVPARKGCLKQTGGGATEAKKVTFGAEVGKARRLRSRVIWSPVVAKTRGKSARAGTDSAAEDGISADVGADVPVRRSRRNSFNPAEAEEAGEAVAVDRKPKRKNQENDEGVAVIAQARVTRRSNLEWSATVLPPAVEKKRGRQNAAESDVQKSALVEVTARTTRSRSIVPVVVPPTVVENKRRKTGDPQTTVELTMLSDVPRSDFPATRSLRNKIVHVNNSVVDETHTTRQLENKMRPSTRRHQQVASSPEDKGQKIPATSKSPLLRWSRRNYSEANSANSVNIKLAKDSSTAQPLAHHNSHSEDLEKQPAVKEPIKRSTRKSIALAALEKEKDVIEGKNPEAHVRRSTRKSVVQVKDTKSIVEETQYANSEDVAKQPATKGPARGLRRKSVITELHEKEKSLIAEKNMETDEAILTRKPVIPVKNIKAVGEGIQIGKGKDVDKQFVVKQPTRRSSRKSVLPDMLENNSGLLAPKMNAEMNVRRSTRKSVLPDMHNEKQDHHKMARNENLQSGKYQDGEKQQKVKDSIRQSRRSIATVLLEGQNNDEGKKFKNPTRRTTHKSHALNAVEEVSMDHIEVGEEGLKLRKRSRFLLEISSSANVSWKHQNAQISNEKDNTEGSQQASNCTTSKRRSSKKRRTTAPEEVMPFKVANDDIVIMEETKDTLEYNNESSSKVQEICQVNAAREEFSSGPLLVTVAPSDEICTVQSVAVVIPGSESGDDANQSSDKSKQPQEHSVTQTVDDHLSETRSGKLDQSTCITGLVSDNCVVSEDKTLMSEDREEQSPVSGEQRVSLEANANEPEEKNLANVTSTDLHTKSLQHDIDRIAKETDKEVLAQENCNDQPVPAQTDQEIKLNDELADPDVLAQENCNDQPVPAQTDLEIKLHDELADPDHEEQSPVSGERRVSLEANANEPEEKNLANVISIDLHTKSLQHDNGRIAEETDKDVLAQENCNDQPVPANEPEEKNLANVISTDLHTKTLQHDNDRIAEETDKDVSSLVFPIEEHEEKYAVSPIAVEKSVSREASACESAGKPLTVIFSNDLHTKHLQHDCDVLIKETGEDVLAQENCNDQPVPAQTDLEMKLNDELADPEVLAQENCNDQPVLAQTDLETKLNDELADLAMESGCSITERNEGLVAHNLDQEGFLEATPECKQECGLPEETVISSKETGSLLCADQSPIGLESLFSQESIVESVGHCALASATTHTENGFDDSKDCHNKSALENVHVPEPCSHNDTKGGIFKNVDCMHTSQRDDRMEGVPEANTDEEHVLSAFLLDANHLNVVINSEEVVCEGEDSKELLHSEDCKASSEKTDVNDGNVYGISDAVVRCALHAPADDNYEIFLGPNTDVPRQVYNDGCSDVKEDRFASKPWTIDIIEDASVKERSNLKDWQLDSKLEGTEIVESGLYFNKDIGNILHSGSIGEITPSGSGLSKDSSVDYRGEVLDGFSMEASLERSSTRGEQNGCRLDAIENPSITLATSGYKHEGALSEEAVYTKKNYAGTCLSNPRELIMELQSHFSKENINESDPHDSLVFPTAENSADEQLVKVHHGSNLSQLGLTDLLDGPIGCSNTDVLCQCDNHKNQSNEDKVEEVEAVSAAKYIESEVVLLPSQERSNLNNEQLNTKLESPNIMGSCLNCDNDVCNTSDNGSVFVIGKRTPSASGLPEDYPKDSDLQQPVLDSFSVVSSFQDNISGKKTVSGVAGSEILSLSLATPDYKHEDGFSEEAVCRTKNYTGTSSVDPRHLDMEGHSIYSEGGTEKSNLQDNLAFLSAESGKDEPIICHVEKLVDAHASSDTYQGPCQDLGRHEEQESCMSIPMQAKESGGVLRSSHTKGSVTAAQIDLAGDAHLIVSDNAAAKQVFSEEKEETKSISSSDIDILHEKSYSSGHDDHAACAAETQFYHPQKASISDGLHLGPSSLQVESLDALDSDILYVNTGVLEQHHKEGYYEPSVYQITSGICTMSEAEPFEVLETGKDVKTPSKLDEQLNPGLDGDEAEKHSLDCGTDTSPVMSKRTLSSPGSGPCQQYVNESTTSTQSTDNHPNDLPAPRSPEQSACFQNDNDSGSVGICQSSRRRGIDELCGKLQSFKVSSAVKGSYVAMGAPRPKPGDSTSRSAAALLRNIENTTAVKAGRPPVKPNADGKDSSRRALQPISGRPDSR

SEQ ID NO: 69408 - protein, 281 aa, Zea Mays
MAISISQEAFDSMVRENMEDLGMDPDEALADAVEALTLQGADLSGIVKRVPGEATAAEVSPVVRVLDELKASLSASGGSEQDLDGLVSLLDELRNLCCSGEGSENAAIAVRNGVVEALVALCASARVEQERLLASALKSLSSVLRDVASTEKFRRSEGPRIVMDLLQGGSENSDLLDAGFSVVAAGSAGNEVVKESFMDLKVDELILRVMKDKSKSNVQSLYDAIRVLLKPDDNRVVASQMNLARYMDTPGDLLKSGLQKFLSMHFVSKSLLPVCHLLVLL

SEQ ID NO: 69409 - protein, 292 aa, Zea Mays
MYVARESTKLWRRVCAETTAELQLLLQKWQLLLAGLVFQYIHGLAARGVHYLHQPGPLLQDLGFMALPELGQEKGYLSESVFTFIFISFLLWSFHPFIYHSKRFYTVLLWRRVLAFLVASQFLRIMTFYSTQLPGPNYHCREGSKLATLPPPNNALEVLLINFPRGVLFGCGDLIFSSHMIFTLVFVRTYHKYGSNRYTVNLVVFFVDNKLPEMADRTNGLSLLPVSTKDKDGRMKEELHKLEKDGRMMDEFHKLLNGNSIDATDWRQRVQMNGKHGEDTSHTVADATSAGT

SEQ ID NO: 69410 - protein, 194 aa, Zea Mays
MGNTRTVESEGQFEYGNYRKEADDLHSVVLYLCQKSYDIAAVVGHSKGGDVVILYASVHDDVGTIVNLSGRFDLRKGIEERIGEGSIDKINKEGYLDVKDKSENASYRVTKESLMERLNTDMRAASVSISKGCRFLTVHGSADKTIPVEDAHEFAKHIPNHELRVIEGANHNYTSHRKEVADAVVDFITSNVTV

SEQ ID NO: 69411 - protein, 257 aa, Zea Mays
MCLFDRDLLKIGTGAANHVERRKANRLHVEVVIVIAHIASDSDCCMANCSSTQVLYFEDFVPCQILQSSFDVLMSTDWQSYGFKLKGGLMGDDGNAVLEWDNMAFARIDISIHTYHECAMQERQGSPQDRYLLRKALKSALTHLKADHAGDFLSCHGQRVREYVPDLAESIAGLILSSTDEEFQGECFALLGLGSEQDVSGGAVQSSICEKMIRIIEINDTKDNSEDNVPYLFECEKLDEDSELDEGGGDEDMASDF

SEQ ID NO: 69412 - protein, 308 aa, Zea Mays
MGRFEQVTPEGPETNQHDEQRSIRLHAFSDLSHVPAATFIYLLKDCYGYGTNKATSKFKILMQLVKVALHNGPQPGPFTYVVQCMYIVPLLGKTYSEGFSHMLTSSLKHLKSVESAQKDFLEAKHLAAQLVLDILDSIVPHENRILVKLLETFEIELRDMARALYDSELDDGDLMKAREHLRQQVKRCMESESNALAVTLITHFSIQCCDESFIIKLIKNNQLEIAEQCAIFMGKEMISLVVQKYLDMKMLKSANKLVKEHELTEEFPDVSYLYKESSVKKLAEKGCWDIAETRAKKDTKLLEYLVMY

SEQ ID NO: 69413 - protein, 402 aa, Zea Mays
MGDCVVEDGHVHHPSDEVEGAVPLTVAVELDERAGESREEGGGQRKKVGGIRREPSFSRWCRDTSVAAASNTAVAAAISDSDSDDSEEFDLPLLPSSSGGGSSPMDIEAGATVRSDDLPISPRLLAKVIGLIACWYTLSTCLTLYNKEMLGKHMWKFPAPFLMNTVHFTMQAVASRAIVWFQQRGLEGGPNKMSWKDYCLRVAKETEFNLWGFIFIMLAAVMSGFRWSMTQILLQKEEYGLKNPFTLMSHVTPVMAIVTAIISIVMDPWHDFRASHFFDSSAHIIRSSLLLLLGGALAFFMVLTEYVLVSVTSAVTVTVAGIVKEAVTILVAVLFFNDPFTWLKALGLAIIIFGVSLFNIYKYKRFKKGHYNENAGTNTQSSNWTSKYVILDEDTEAQDDTG

SEQ ID NO: 69414 - protein, 134 aa, Zea Mays
MHQPHVKLVEQELWQKEDKGLIGVLPVRDSEATAIGSLLSPGVGSDSGGGGSKAVGSAGESSKQHLKNGKEPIQWHTKGVAARALHLSRGVEKPSGRVTYIVVLEGLCRFSVQELNARGPYHFARVSRLDMTKT

SEQ ID NO: 69415 - protein, 827 aa, Zea Mays
MLDISESVRRAAYSVLATKFPLQTLSIKQRTTVLHRGLSDRSASVNNECLKMLKDEWLVKYCGGDVISLLRFLDVETYESVGESVMAVLLKDGALRVQDGHSIRQYFTANGEKAERDSNIQLMDAEVALYWKIMCKHLQAEAQVKGSEAAATTGAEAAVYASEATDKNDLLDSVLPSTITDYVDLVKAHLSAGPNYHFTSRQLLLLGEMLEFSDTMNRKIASSFLHELLVRPLEHEVDDDGNQIAIGDGVSLGGDKDWAKAVAELAKKVHSSVGEFEMVVSTVVEELARPCRERTADFMQWMHCLAVTGLLLQNTSTLRNLQATAIEPSELLHSLLLPAAKQNHVDVQRAALRCLCLLGLLENRPNAELVKQLRLSFINGPDLVSAIACKALIDLVTWHGPQEIDRAIGIESPDPSYEKSQFTQVDLSDMNDDDLNIGVLDILFSGFHKDHWEFDLEGDNHDNVPTILGEGFAKILLLSGNFASIPADLHTVILAKLIKLYFSEETKELERLKQCMSVFFQHYPALSDKHKSCICNAFVPVMKAMWPGLYGNAGGSTHVISKRRKLAVQASRFMVQMVQTQLFSTESMDQASKSSESASGLADASNNFDISEEGLAIRIALEVASCPDKKTAAGKAYALALCKVVVLLRFRQSEQKAIKCMRGLVNHLAASVASDKELGKELAQMAARLRSLDACPDEELAQDDADAIFKKLGFDDGFKLDTNQAVPPTPAPRSVRPPAPARRRARQAPSSSDDSDEEAGEADVPATSASRVPATPSMTAAARSQRASKTAALSKMSAKPATASDDSELDGQSDVTSEEDASDEESL

SEQ ID NO: 69416 - protein, 839 aa, Zea Mays
MDIGGSGGIILSPGSEDDKFARRRSRRVSFADTTAVHVFDRDEDFETPPEEREPDSTPAPPSPRRSSVGREVEDDTEEDFNRPPVIFLHDVDSSYPDSAAESIASADDENFFGPVSASFIQTGRPSDSGMSEDDNHDITMDSRTFSLHFRNIAPPDDCTAYSAGSLMTPNTASEGPLKELTASNPARASINGRDTLTDMSLLSGNPRTYGYDKLSPTLNSMMKKIKGSKQTNSPKLGISDVTSDCVLTLSTSEEESREENLCIDNGVSSDELVMVNTIAEHISMRNPVSTSTDLIQDDNEMIIDVQENSKNCNHDHMDDDPGANNTAEPPAKISPAYKSFMINGDVQSHLVDQSSSKDRPSGSNCTASVSSMCNVDMETHLLDQLPGKDNTYAAQSSSEATAILLMDAEQLRQKNEVMDTETVLHTPRTAGLQLQVPRGSISSLRSKRHKLFTNTVSNSKVARQEGCSSGTEFVHHDKRLSSLKHQELAAASQLQLVEKNELGHRASDMFSNTEDHDSTLSVSSHSVPKLKKTNESFVLGTPRRHGLNESTKVLDTLCHAFTLDSQPSRECNSHVDLNGVGRKRTAEENGYAVQECPEKTTKTARSPRKSRKEIPCVSQPSMIEEKQNGAHDNGKSVDIDWSKVVCTITNATEQVLPASISKYNLQQLDMLSDRLDEIHMARKYKRLSTAVRIKAFCGDKQKRLEEARFLHDKLFYEKAKLQINNMKLVKLQKKAQLCQDGIQECCFLKSKILGAGHMEDSSLPAATTVSAGDRQEELDIISEKRLELKIIQRKVEKLRSSLECFHNIEGGIGSDSVVRYAEEQLMMRNQHRIIHCSAS

SEQ ID NO: 69417 - protein, 50 aa, Zea Mays
MSKVRSRRGRSHMGYDATVYGWGRGSGFFSTCVKMSLLNIMLGAVIPLAR

SEQ ID NO: 69418 - protein, 138 aa, Zea Mays
MAKETGTNEIVALKKIRMDNEREGAQSGTSKGVDDNKYKGSIYMVFEYMDHDLTGLADRPGMRFIVPQIKCYMKQLLTGLHYCHVNQVLHRDIKGSNLLIDNEGNLKLADFGLARSFSSDHNGNLTNRVITLWYSQSS

SEQ ID NO: 69419 - protein, 835 aa, Zea Mays
MRWSDGSYLEDQDHWRLSGIHRDVLLLSKPQIFITDYFFKATLDENFSLADIEVEVEIDSHKQDQEHVPTLSIEATLIDNSGLSNSIDADLSSANAVNLKPKPKRTRSPCLGFHGYVLGGKIENPKLWSSEHPNLYTLVVLLKDANGKLIDCESCQVGIRNVVMAHKQMLVNGCPVVLRGVNRHEHHPRLGKTNLEACMIKDLILMRQNNINAVRNSHYPQHPSMVERDKNHACIIVWSLGNESSYGPNHASMSGWIRERDPTRLLHYEGGGSRTSSTDIVCPMYMRVWDVVKIAKDPSETRPLILCEYSHAMGNSNGNIDAYWMAIDNTFGLQGGFIWDWADQGLLKEDSDGSKFWAYGGDFGDTPNDSNFCLNGIVWPDRTIHPALHEVKYLHQPIKISSADNMLKIENGHFFETTEALDFSWVLHGDGCVLGSGPLNIPTLAPQTSQLINMESSPWFALWSACAAKEVFLSVNVKQRHETRWAKAGHLLASAQLCLPQKNGFVPSVIALSSSPLVCERIGDNVTICKNNAWKIKVNSQLGTIDSWKVNDVELMSKGILPCFWRAPTDNDKGGFFTKPYDSRWREAFLDNVSFHSSQFSVKELPDNTVEFSTLYYGVPGHLPKPDDEASESILFRVKMVCRIHGSGDVVLDYEVNPRSDLPPLPRVGVVFSAGRSLSHVTWYGRGPFECYPDRKAAAHVGVYESSVEELHVPYIAPVECGGRADVRWVALRDAGGLGLYASAHGGSPPMQMSASYYGAAELDRATHVHRLVKGDDIEVHLDHRHMGLGGDDSWSPCVHEQYLLPPTRYAFSLRLCPLLPSSSCHDIYRSQLPS

SEQ ID NO: 69420 - protein, 517 aa, Zea Mays
MVEKLAQFTDIRCCLIVGGLSTKIQEVALRSMPDIVVATPGRIIDHLRNSLSVGLEDLAVVILDEADRLLELGFSAEIQELIRMCPKRRQTMLFSATMTEEIDELVKLSLNKPVRLEADPSLKRPATLTEEVVRIRRARESNQEAVLLALCLKTFKRSVIIFSGTKQSAHRLKIIFGLSGMKAAELHGNLTQAQRLEALELFKKKEVDFLIATDVAARGIDIVGVQTVINFACPRDVKTYLHRVGRTARAGREGYAVTFVTDDDRCLLKAIAKKAGSQLKSRIVAEKPVAECARLIEQLEGQISIIIREERVEREARKAEMEIAKAENMIAHKDEIYSRPKRTWFATEREKKLLAAAAKESLDHGKSTSGVISAKKAEDLRLKEKRRREHEKNLPRKKRRRLEAQREMLEDEDDEKTKENDRGKQPMKGQSLVDAAYRKAKSLKAASKRAPGARKGKKEKNERQHSEKAPNRHEEMRDLFQNDMSEWKQGRSSKKNNKFAPKKSRNSFKSKARYKRK

SEQ ID NO: 69421 - protein, 343 aa, Zea Mays
MAPPHVTRKKGKGAGGKTDLRPDRKQFKRHHKEDAAAEQGDGNGEPGSDLEDNISNTCLEIANGTEANAKKSDKQLKKEARKQRELEISAMEERALQEDIPQTPDDFEKLVRSSPNSSFIWIKYMATLLDLADVKKARAVAERALKTIIPREEEEKLNVWVAYFNLENEYGSPREDAVKKVFQRALQYCDPKKLHLALLAMYERTEQYELADELLDRITKRFKTSCKIWLCRIQFALKQEFKCGVPEEGRSRFELILREYPKRTDLWSVYLDQEIRLGDVEVIRALFERRVACLTLPPKKMQFLFKKYLNFEKSLGKDNERIQLVQQKAIEYVQSSLPSQDNS

SEQ ID NO: 69422 - protein, 883 aa, Zea Mays
MAGWGPSRLPTCGPWGRGVALERELSRDGSHYSISSGILPSLGARSNRRAKLRPFIVSPYDRRYRCWETFLIILVIYSAWVSPFEFGFIRKPAGALAAVDNVVNAFFAVDIILTFFVAYLDRMTYLLEDDPKRIAWRYTTSWFILDVASTIPSEFARKILPPNLRSYGFFNMLRLWRLRRVSSLFARLEKDRHFNYFWVRCAKLICVTLFAVHCSACFYYLLADRYPDPTDTWIGNSMPDFHQRGLWIRYVVSVYWSITTLTTVGYGDLHAENTREMIFNIFYMLFNLGLTAYLIGNMTNLVVHGTSRTRKYRDTIQAATSFALRNQLPSRLQDQMISHLSLKFRTDSEGLQQQETLDALPKAIRSGISQYLFFNLVQKVYLFEGVSNDLIFQLVSEMKAEYFPPREDVILQNEAPTDFYILVTGSAELIELRNGGEQMAGVAKAGDVVGEIGVLCYRPQLFTVRTKSLCQLLRMNRTAFLSLVQSNVADGTIIMNNLMQLLKQQKDNSVMVGVLKEIENMLARGRLDLPITLCFAVNKGDDLMLHQLLKRGLDPNESDNNGHTALHIAASKGDEQCVKLLLDYGADPNARDSEGKVPLWEALCEKHNAVIELLVESGAELSSGDTALYACIAVEENDAELLENVIRYGGNINNPTKDGTTPLHRAVCDGNVQMVELLLEHGADVDKQDSNGWSPRDLADQQGHDDIQALFKSRKAHRKHASNGRVAPMLIGRFNSEPSMPDMSHENARVRSEVVPQKLLRKRVSFQNSLFGVISSSHAHQDTGRLLSKGLAGTEGPNCRHDSLIRVTISCPEKGGNAAGKLVRLPRSMAELLELGAKKFGIKPGKVLTVGGAEIDEVELIRDGDHILLVSDEWVPDVEQIRP

SEQ ID NO: 69423 - protein, 944 aa, Zea Mays
MMASSQEKATSGVLRNAAALLDEMQLMGETQGAKKVINSELWHACAGPLVCLPQRGSLVYYFPQGHSEQVAATTKKIPNSRIPNYPSLPPQLLCQVHNITLHADKETDEIYCQMTLQPLHSETDVFPIPTLGAYTKSKHPTEYFCKNLTASDTSTHGGFSVPRRAAEKLFPQLDYSMQPPNQELIVRDLHDNMWTFRHIYRGQPKRHLLTTGWSLFVGAKRLKAGDSVLFIRDEKSQLLVGVRRATRQQPALSSSVLSTDSMHIGVLAAAAHAASSGGSFTIYYNPRTSPSPFVIPLARYNKATYLQPSVGMRFAMMFETEESSKRRCTGAIVGISDYDPMRWPNSKWRNLQVEWDEHGYGERPERVSIWDIETPENMVFSSPLNSKRQCLPSYGVPGLQIGSVNMSSIPRAQGNPIGNLQHMPGMGSELALLLLNQSGQNIGSPIACQQSSFSSIIQNAKHSYFPPKTFGASTASMKQESMPSTEAQPQLNALGIQRSDRVSCEVQTASDSNPAQEMSVKPRAPRSTDSHSSQSISDQNSKGEPRTKTRRSKKSSYQKTISDKSELCSVPSQICDDKKHGSEPRLADCEAEQATCGNNEESSGALTHGDFAGELQVQQQVEQHELLAPPKIESSKSPDGGKSVSSFPNQGCIPQFFEGLDWMIPPSYYQDSNGIQSVTASDNIFNPSEGIPSTMNADALDAFQTSCLSECFPSSIQEFIGSPDINTLAFMSPEMQQLDAGSNLPSTSNSYVQMSFSEESHSASLSGLHMEAIHINSSSCSQPLATGSFDAGAFPKLSNIRECQPLPLQEIHTSSMGTPSCSMDAAAEYGTDRSAKQMKPPVRTYTKKLGSVGRCIDVTRFRDYHELRSAIACMFGLQGKLEHPGSSDWKLVYVDYENDVLLVGDDPWEEFINCVRCIRILSPSEVQQMSENGVHVLNDCIQIA

SEQ ID NO: 69424 - protein, 713 aa, Zea Mays
MALRHLVTGQNNCAPDGASSSNPLNALANAFLGQSSKAQSIKELPGSVSVPSTSGFSAPAPLSNIPGSENEFKQDQRPFVQGSDFIHGGPANDWIKSFRPPGVPELGGIEAHFPDFEQIYNNAGTTFQPPLDGPPQRVLSGVLHSFLTSGPAGVPFQPLPVPAALGLSESDKQCIRDRSCIMARHIFSDQPEEYIQAQVNTLLHSLDIDNRMRGPMHGQYPELQEYWNQSQSSMGPALMHNTADKWITEFGKQNNNPENWAKSFEQQYGPNGWASEFEQHQSQMAMGQMGGVNMANLAAMEQSRMLAQTLASNNDPKFQVKEGLASQSSGWADEFQTQYKANANSWADQFAREELSQGADKWVSEFSSQHNQGALNESWVDEFSKLNVTDEWAEEFSGGGFGESSADPWVDEFQEHLSSFKQSSGASRGVYVYSENNPYVGHPNPMQEGQELFRKGLLSEAVLALEAEVLKNPDNAEGWRLLGITHAENDDDQQAIAAMMRALEANPTNLEVLLALGVSHTNELEQGEALRYLYRWLQNHPKYGGLVPPQSTDSPYGPDVVRLFNDAAQMSPEDADVHVVLGVLYNLSREYDKAITSFKTAVQLKPQDYSLWNKLGATQANSIQSADAILAYQQALDLKPNYVRAWANMGISYANQGLYEDSIRYYVRAVTMNPKADNAWQYLRISLGNASRADMIAACDARNLDALQKEFPL

SEQ ID NO: 69425 - protein, 146 aa, Zea Mays
MNQLDSFSDKLVKRILKAHEPYNHNDNTKCSVVSERVSYEFVPERKACSSLNKSVVQNASGCDSNRNKCLASGKAVSKKKDQSTNNSLDKENMSSCGSGGTKVSSPGSLGLAREVDSGNCLSLLDNRNCPMTRTSKANHNNCRQTA

SEQ ID NO: 69426 - protein, 87 aa, Zea Mays
MGRPFFSLMRFTKLLEQRPLQGRSTRGKTLVWVAFRRFTVAAPQALRQGGQRQQVRDLAGGGLGDDRPEVDHQAGLHFLRRRVVHER

SEQ ID NO: 69427 - protein, 294 aa, Zea Mays
MKTRMDKSICSWWDGPCLFEVLDRIVVPLRDPKGSVRMPIIDKYKDMGTVAMGKIESGTIREGDSLLVMPNKSHVKVIGLNLDESKVRRAGPAENVRVKLSGVEEEDVMAGFVLSSVANPVGAVSEFIAQLQILELLDNAIFTAGYKAVLHIHSVVEECEIVELIEEIGMKKKKEEDPKKKKPKRKPLFVKNGAIVVCRIQVNNLICIEKFSDFPQLGRFTLRTEGKASSLEVGSIFSFSVHVEKIIYDVTYEILCFPFCLLLPPFTVILDTLLFLLVHSRSYVSRKTKTSYNL

SEQ ID NO: 69428 - protein, 243 aa, Zea Mays
MLAPILSKFNSLKTSRKGLVAMIEYPSLEAATGEFSESNVLGVGGFGCVYKAVFDGGVTAAVKRLEGGGPECEKEFEVSILARWPLVTGEGVICSCPDCFGCGCWQNELDLLGRIRHPNIVSLLGFCVHEGNHYIVYELMEKGSLDTQLHGASHGSALTWHIRMKIALDMARGLEYLHEHCSPPVIHRDLKSSNILLDSDFNAKISDFGLAVTSGNIDKGSMKLSGTLGYVAPEYLLDGIVSA

SEQ ID NO: 69429 - protein, 941 aa, Zea Mays
MDAGEMEDVRAAAAAEEVISSRGGSVLGKKTILKSDHFPGCQNKRLSPQIDGAPNYRQAGSLRVHGVAMPTMEGIANVLNHIGAHKKGKQTRILWHSLREEPVIYINGRPFVLRDVEKPFSNLEYTGINRERVEQMEFRLKEDILQEASRYGNKILVTDELPSGQMVDQWESVVYDTVKTPLEVYEELQHQGYLVDYERVPITDEKAPKEGDFDNLVRRISQVDIETEIVFNCQMGRGRTTTGMVIATLVYLNRIGASGIPRTGSIGKVFYAGNDVDDYMPSSEEAILRGEYAVIRSLVRVLEGGVEGKRQVDKVIDKCDSMQNLREAIATYRNNILRQPDEMKREASLSFFVEYLERYYFLICFAVYVHSVSSAHQTTLSVEVSFSDWMRARPELYSILRRLLRRDPMGALGYSSSKPPLTKIVESANGRPQDMDVVAAMRNGEVLGRLTVLKSDHCPGSHSLNLPERVEGAPNFREIPGFPVYGVANPTVDGIRAVIQCISTSKGGRPVLWHNMREEPVIYINGKPYVLREVERPCKNMLEYTGIDRDRVERMEARLKEDILREAERYGGAIMVIHETDDGEIFDTWENVDNEAVLTPLEVYKNLVSEGLPIKYARVPITDGKAPKSSDFDTIAFNVTAASKGTAFVFNCQMGRGRTTTGTVIACLLKLRIDHGRPIRIPVCQYDHEDDAIYSTGGDATDHNGHLNSESWKPRTLTKLNSGFGINDILLLRKITRLFDNGIECRQTLDTVIDRCSALQNIRQAVLNYTRVINQQHVEPRVRRVALNRGAEYLERYLKLIAFSAYLGSEAFDGFCGQGQTKISFKGWLQQRPEIQTMKWSIRLRPGRFFTVPHEQKATYPPPQGDVTMETIVKARSGSVLGKGSILKMYFFPGQKRSSSVNFRGAPHVIKTQPEETLHRRWSSQILERKWLFTSRDRHLF

SEQ ID NO: 69430 - protein, 56 aa, Zea Mays
MNRMDETCTKLLHRGFNLKLYVMMHARPIRPHNSCQHIVAITFYDGGIPTHSVIEH

SEQ ID NO: 69431 - protein, 121 aa, Zea Mays
MRIKAERAERARWRAGNSRRGYKESARHWARRGARHGVDARARDACAGSSGGCARPRHQRRAAQPASWSRELDAARTRRRNRAHGSWEASTREGQRLFPTDIQGEVTTMGGRLGRAGRNRG

SEQ ID NO: 69432 - protein, 227 aa, Zea Mays
MQNGELNSEHVLLELEVHVPDLRHLHAQHRGLDHVRRRRRPQVGDRRREDPAGARQDRGDRGVAGRGDHHQPVQRSGREEAVEGARRPRTRHRRRRSRGATRELGQRVAARAGELHLLVDLLHLAGFVHKEVPGQAVSDGVDVPGRRPAVGGLRGVRAAGRAGLARRLRPQLLGHRVRGRKAPCSSPCSTPSSPSWWHSSPTSSSAKTYTLGGCSRSILLLLYSIPD

SEQ ID NO: 69433 - protein, 121 aa, Zea Mays
MESLFHRLPVFVLLICVTCVSPGEGGRARDRDGGDGGCRGGRGGGGCCCGFDAAAVWEETAPRDWEWAVPLGLQQAGSRPGTDGRRRRMEAAATSQPHRRPRMQEKEAVFAWTGIADLTAD

SEQ ID NO: 69434 - protein, 144 aa, Zea Mays
MRGGGGGGMMDDEERVGHAEIPTSFGPELRACLRCRLVKTYDQFRENGCENCPFLEMDREHDNVVNCTTPNFTGIISLMDPSRSWAARWLRIGSFLGAIHLLSRRSFQKSIKGFVKTTTCSMCRPSVSKYQDGNDGVLVLKQYR

SEQ ID NO: 69435 - protein, 402 aa, Zea Mays
MIRVSPLLLARPLRVHCPTPSRLSRPPLHHPNPHPRSGEGGLGCVQAKGTRRRCRASLSVPIAAQMDPSSEPLYAQVEPYDSGFLKVSDVHTIYYEQSGNPQGHAAVFLHGGPGAGTSPGNRRFFDPQFYRIVLFDQRGAGRSTPHACLEQNTTWDLVADIEKLREHLGIPEWQVFGGSWGSTLALAYSQEHPDKVTGLVLRGIFLLRKKEFDWFYEGGAAAIFPDAWEPFRDFIPEDERNCFVDAYNKRLTSSDPIVQVEAAKRWTMWEMMTAQLIQNNDNIKRGEDDEFSLAFARIENHYFVNKGFLPSDSFLLDNVDKIRHIKGFIVQGRYDVCCPMMSAWDLHKAWPEAEFKTRANPVPSSGLHRPRFLVQSPDTRGSNPDTRRSRNPEFFVGMSSPF

SEQ ID NO: 69436 - protein, 103 aa, Zea Mays
MADGEDTGHARPQHPMKQSRFDFTKVDAAFLPTITGRSWASPPPHRHLLCPPPPTLVLSFGSDHRRWLLSPIVRPSPLPLPNLPSIRSPVRFALISLLSCIKL

SEQ ID NO: 69437 - protein, 273 aa, Zea Mays
MRTSTCLSFFTLTVLPQTFWLNIISMPSIAILPPLVLNDEDYYPERPGEPDCPYLLSSRCKFKSKCKFNHPKEMVNALGTRTDNESLIADTTILPVRPSEPVCSGEVDCSFYMKTGSCKYGSICRFNHPDRSVVDIAFMAPVQATLPFPAPIVPAVALNPAANFLQSFDFHATHVPVEPMPMIYPQRPGEIVCDFYMKTGSCKYAQNCKFHHPFDRSAPHSKENEDTQQPVALTLAGLPRREDAEACAFYMRSGTCGFGARCKFDHPPRQDDV

SEQ ID NO: 69438 - protein, 101 aa, Zea Mays
MGLPSCIYFALISISNKNALHSTRIQLPHLRSMIFDKACTSKNFRWNHKLFSPRRISHGVFIASIFEGVRLIRYVAVNTASLHRNFETFIVNISERATSKM

SEQ ID NO: 69439 - protein, 465 aa, Zea Mays
MCDLFVSKYFPCIFFPNQAADIIAVSTSLLDTLPAVTTPTERADDDDETPMDVDIKINLDVDLERQITAAIDPKLLQHLVNALFRGTLSINDSDLSEPSDAEVDAVGCICAFLHVTFNTFPLERIMTVLAYRTEIVPALWNFIKRCHANRRWPFFSKFASSLPADAPGWLLPMSVFCPIYKHMLKIIDNGEFYEQEKPLSLKDLKSLVLILKQALWQLLWIIPSSSTQKVSSNPSGLKKLSVENVKIRARVGLSELLTQLQDWNNRLPFTSASDFYSQEATSENFVSQAILGNTRASEIIKLAPFLAPFTSRVKIFTSQLTSSRQSISHSALTRQRFKIRRNRLLEDAFDQLSLLSEEDLKGPIRVSFINEHGEEEAGIDGGGIFKDFMENITRAAFDVQYGLFKETADHLLYPNPGSGLVHELHLQYFNFLGSLLGKAMYEGILVDLPFATFFLSKNCIDIFYF

SEQ ID NO: 69440 - protein, 75 aa, Zea Mays
MLPTMSHVPRGGPPPPMSNCRWLSRFNALFGHSQASTTSNDTLGPLPKALAASTALGADGGSPSPAMLIVLHLGQ

SEQ ID NO: 69441 - protein, 696 aa, Zea Mays
METLPNGSVNNAELNQENEKSMYASESEEARDIFVYREDVVSLKSKEDVRGVVLEVAGEYDYDGSITDDDIDTEEHEDKTAYGAENGVADGGLQCSLGPGEPGASTFVLVAYDYIESGGAFGDPYKLYGVSQSQKLLPNKTEDDSMSIQLETKGDQQSVPLEEQNPEDLTLLSRFSYTNWQLTDWCLSQRYTSCTNDTMIDSDKHTWQICTCSENSVPLSGIPESQADAQIDTDTGHRQTDVDSTADVLSMSDGDNSCIAKESETGTSASSISNEGPQDNATSRKKFRKDGTKECGVAATALIPIHSPNEHEFFPEQYVVDKVTNDVGVDDSSEPRRVGLVRGVNAKDRTATVSWFKPPLHPEEPKEIACNEIVSVYELDVHPDYDYCYGDIVVRLPPVKPVIESTNSKEQMELDKTLDSSEGFAASYSAPPDTSADEQLSQKESCLQFTSLSWAGNIVGFQDGEIEVIWGDGSISKVGPHEIYVVGREDDGASLDDGTASDGSSWETVDDNEMDVLHDSAKGDSQNVPENSIGRENGSFSSQDGSSVATGPLSVAFEFVTRLASDLFARGRRHLDGSSDAMDEVESHWSNEISEIGDDIDKCNKNHVESPEHAAVIENDSSVEKSVDVVMADNPVHSECFKHFDVLQCPLDHHYLENTTQVEKSGSKRYNRNGAYLRRTYQTIFMSGYLRIAWIS

SEQ ID NO: 69442 - protein, 531 aa, Zea Mays
MEQSEELRRLALAGLHYFQTYDWFMLMTTITLGYIGWMVNLIIHVLQSYTSYPVILLKRAQLYPNNTSMKVYICGCFFMGLSSILLLLEKSPLLYHAYVLCTIFLWTRIVQKIDFLKSVWRELANMPFKYIFNLLTSSVVALLVLEFLVMSFFDRKIYTWCFLVLGILGSTYVALFIQASAALAIYIWLACWFLSVFTLMPAEIPENNNLVIFSGGLIILIGLASRWIKSNSSSFWLYLTRANKRDPQSFKLYFVQVILVAISSIMVWLSTSHRSQNRELLSLHQFINWSVAGVAMVLPLFSPPSVLSRLTSIFLGFAPPFLLLSIGYEAVFYSAFAMVLIGWIFVESANLYCSEESGSARRRSLADNSVFGYEERHLRLSDLRIPLLFVILFNVAFFGTGNFASIASFEISSVYRFITVFSPFLMAGLLIFKLFIPFMLVICTFSAITKVVRIPRLGCYFLVILLSDVMTIHFFFLVRNTGSWMEIGNSISHFGIVSAQVVFVLLLFALTNIYTRDILVSSRQLTARKVM

SEQ ID NO: 69443 - protein, 205 aa, Zea Mays
MFSFTSQMQDARKLPLMQYVVCLSITEAIKELCRAKGLPELDVRIKWPNDLYLKGLKVGGILCTSSYEPKVYNICTGVGLNVDNEKPTTCLNAALQEANHTSPILKREDILAYFFNKFENLFEIFMNHGFQVLEEQYYNSWLHSGQRVVVHDAHENKSGSVVTIQGLTPTGYLHAIGEDNKSYELHPDGNSFDFFTGLVRRKMEA

SEQ ID NO: 69444 - protein, 52 aa, Zea Mays
MANKQWTYTMIEMTDCSCYRFGKNMWKANLGSCFLQVQTTLVFIGVVRELFS

SEQ ID NO: 69445 - protein, 215 aa, Zea Mays
MRAVAAAASPPLRALLLLSRHPRRAGFTNWPSLPRGQNAGPTAPPAATAPKPAAPSRRQGRGLTASLPRQVARISTPHLRPPATPPRCPDRRHQSHGVRALAGCPRKTVRHLPAPTSHLRFTMNPSSSSSSSGGTRVLRHMAAELRLDMRTDGYVRVRDLLKLNLQTFAKVPLKSHTVDEIREAVRRDNKQRFSLLEEDGELLIRANQGHTVTMG

SEQ ID NO: 69446 - protein, 60 aa, Zea Mays
MYVFLHIFVVIRSSKSRDFYFGNMIFQLKFTFSLDCRFCLLFCSVLEYHLYSCNFTRNIC

SEQ ID NO: 69447 - protein, 87 aa, Zea Mays
MSLNLLYHGIHFLSPRMCLAIFLFPSCRTKPTPPNPRRPSSVQAFHSSTSCAGHQSRAIRKAVAQSAVHRFSAFKLLKRFSRVSSKN

SEQ ID NO: 69448 - protein, 393 aa, Zea Mays
MDLEPGTMDSVRSGPFGQIFRPDNFVFQSGAGNNWAKGHYTEGANNNRNRTRHPRSKSRCSLSKRGEEAGQLSRSASESSSSAGSIGRTPSGRRAGRRGSDVDGDRSSRESFEAQDQKRSMHEISRGERRSWSGQKRKPEPLVEKKSVRAAAEEFFAKASQELIGHSDCRTILLKNVIGHYSEDILRFDMHSVNQLPVPLVPLIGKGVLEEEVMVSFVATNGEPTTTTTSKLVWWNLLEQMTMTPTSCTSVMLSTRTRAPLLRALYKAGSIIVLGKTDFLRPDMSVHRQVIDNGILPILVKIEKKKEKLLSEKMEVIKGLRERFSHCNSNMDANQVQPVLAPEASDPQHSWLDCRLDISKRSPKQLGILQGWSSLWLEEMSKCSYCDGFKATK

SEQ ID NO: 69449 - protein, 851 aa, Zea Mays
MEEGGDPQLPSISVARTTSEGAGAVDLDLLEQLLSGDNGWLEVVSRSPNSVAFPPPSAFFSADATATTVTTTAAPAANASWLIQTGGASTPSVRERFSQALSYIRDTQSDGDVLVQLWVPVNRDDGKLVLTTSGQPFTLDHRSDSLIRFREVSTKYQFPADVRSGESPGLPGRVFIGRLPEWSPDIRCFTSYEYARVTDAKYLDVHGTMGLPVFEKRSYSCLGVIELIMTKQKLNFTSELNTICSALQAVNLRSTEVSSIPRKKFSTASYKDALPEILEVLRAACLTHKLPLAQTWVTCTQQGKRGSRHSDENYRYCISTIDEACFVNEAEMRGFHEACSEHHLLRGEGVAGKALTTNQPCFLPDIGSSTKLEYPLSHHAKIFRLKGAVAIRLRCTRTGIADFVLEFFLPTDCEALEEQKTVLDSLSGTMRSVCQTLRVVTDREMEGEAALEMNELNSFTPPEKDKDELSFGGNSADRRGASWTSLAGTSQQEPELAALRMHGTFSPVGQGPSLSGVQATAEGSKTKRRTKAEKTVSLQVLRQYFAGSLKDAARSLGVCPTTLKRICRQHGITRWPSRKIKKVDHSLRKLQQIIDSVHGAETAFQLNTLYKDLTDTSISSDNNLSGSVTVPPTNQSNLTDFNKHQPHKSSSNMPSTSHSHSSCSHGSQSSPSCSVGATEHAQQGIIDLMKSENPVKDSSIQTMQTENTSLYEHFSVHEAPIDLLQDVTEKANGAHHSSRSLSSPNPKQNTDANMRVKATFGSEKVRFRLNPECNFQGLKHELAKRLSIVDTNPLVLKYLDDDSEWVLMTCDADLQECLHVYKLADIQTIKISVHLAVSPATRVTAGHTGLS

SEQ ID NO: 69450 - protein, 110 aa, Zea Mays
MELLRKRDNSEYKYTIAMMGYGPEDKNAVLELTYNYGVKEYDKGNAYAQIAISTDDVYKTAEAIRVNGGQITREPGPLPGITTKITACTDPDGWKTVFVDNIDFLKELEE

SEQ ID NO: 69451 - protein, 164 aa, Zea Mays
MILATSTVSTFVKYIFYVSDMLMEGQWEKKAVYTFYLVHELYVTFRNFRIRITDYVRYRKITSNMNERFPDATSEELDVSNATCIICREEMATAKKLLDGHLFHVHCLREIGEQAEEEVPLRLLHGSFSSTGRILSTGTVPCCLPQCARPHFAINHEDLTLLFP

SEQ ID NO: 69452 - protein, 59 aa, Zea Mays
MGATGLPATGGLSAISSVDGTATDGVGATTSGVASTTIPVDACTASSSPWITGDVPCLV

SEQ ID NO: 69453 - protein, 398 aa, Zea Mays
MPPSSLHYALVTVGTPGQTFMVALDTGSDLFWLPCQCDGCTPPATAASGSATFYIPGMSSTSKAVPCNSNFCDLQKECSTALQCPYKMVYVSAGTSSSGFLVEDVLYLSTENAHPQILKAQIMLGCGQTQTGSFLDAAAPNGLFGLGIDEVSVPSILAQKGLTSNSFSMCFGRDGIGRISFGDQESSDQEETPLDINRQHPTYAITISGITVGNKPTDMDFITIFDTGTSFTYLADPAYTYITQSFHAQVQANRHAADSRIPFEYCYDLSSSEARFPIPDIILRTVTGSMFPVIDPGQVISIQEHEYVYCLAIVKSMKLNIIGQNFMTGLRVVFDRERKILGWKKFNCFSPSTSENYSPQEARNPAGVSQLRPLNNSAPAALYDSLLLMLILVHLAVN

SEQ ID NO: 69454 - protein, 68 aa, Zea Mays
MREKRRKKRQRVASLFVTTVMGMIADYYYRKRPRHFMDPSEMIERDVAGQKQMLRNMYQGSNVYCTCI

SEQ ID NO: 69455 - protein, 729 aa, Zea Mays
MAMTRRSASHLLSAFRPFSLLLQPHLVDSSPAAASARRAMSSASALRARDEKDVARWRESMGRMRNIGISAHIDSGKTTLTERVLYYTGRIHEIHEVRGRDGVGAKMDSMDLEREKGITIQSAATYCTWKDYQINIIDTPGHVDFTIEVERALRVLDGAILVLCSVGGVQSQSITVDRQMRRYEIPRVAFINKLDRMGADPWKVLNQARSKLRHHNAAVQVPIGLEEEFEGLVDLVEMKAYKFEGSSGQNVTASDVPLNMEDLVTEKRRELIEVVSEVDDQLAEAFLNDEPITANQLKAAIRRATVARKFIPVYMGSAFKNKGVQPLLDGVLDYLPCPLEVYNYALDQNKSEEKVLLAGTPAEPLVALAFKLEEGRFGQLTYLRIYDGVIRKGDFIYNVNTGKKIKVPRLVRMHSNEMEDIQEAYAGQIVAVFGVDCASGDTFTDGTVKYTMTSMNVPEPVMSLAVSPISKDSGGQFSKALNRFQKEDPTFRVGLDAESGQTIISGMGELHLDIYVERIKREYKVDAKVGKPRVNFRETITQRAEFDYLHKKQSGGQGQYGRVCGYIEPLPSGSDGKFEFDNMIIGQAIPSNFIPAIEKGFKEACNSGSLIGHPVENLRIVLTDGASHQVDSSELAFKLAAIYAFRQCYTSAKPVILEPVMKVELKFPTEFQGTVTGDMNKRKGIIVGNEQEGDDTIVVCHVPLNNMFGYATAIRSATQAREGKAECLV

SEQ ID NO: 69456 - protein, 232 aa, Zea Mays
MDSLRGVKLPGVPKGGSALVKVALLGGAGLYAVLNSFYNVEGGHRAIVFNRLEGIKDKVYPEGTHLMIPWIERPIIYDVRARPNLVESTSGSRDLQMAVSREIRKILTERANNFNIALDDVSITSLSFGKEFTHAIEAKQVAAQEAERAKFIVEKAEQDKRSAVIRAQGEAKSAELIGQAIANNPAFLALRQIEAAREISHTMAASSNKVFLDSRDLLLGLQQLNVGGKQKK

SEQ ID NO: 69457 - protein, 839 aa, Zea Mays
MSTCLHVQDPRNIAMSRPLDFAVLKYKNQKLAEQLEVHKFEFCALESRFNDLKEKQRTHNKTLVLVKSYWERLIADLGIVSVCKNESSRSSCSTGNNNIRKESSGSPNCQLGNDVSSEQSTTIDILQKLFLPSSGPWHVNNEFVSAALMKLPENEHSRQLHNATSDVLSKLHVVMRTVDNLHLKHRQLAANYQKQRDSSAWNRAEQKRLKEELTSVVAKLEGSKQKLAVLKAQGDNKQATPILVPTLGNKNMTAEKVRDKQTELQDLEATHKELMELISKRLEEIRRLHTERIEILNKLATFQNILTDFKSIHSSKAFQLVNDQLQKSQAELDDHQTLLEKLQVEMDTFVWRERQFNQKVDLAEIPQKVSAYCVSRIADLEKDVQKLCNEKNMLVLKLEEASREPGRNQVISEFKALVSSLPREMGAVQSELSKHKDASLQLHSLRAEVHSLSSIQTRKEQEIEEMSFRSAHAGSDISQLQSLVRELRENTQELKLFVELYKHESTDSRQLMESRDRELAEWARVHILKYSLSESKLEQRVISANEAEAISQQRLATAEAEIAELGQKLETSRRDLVKQSDILKSKHEECEAYVVEIESIGHAYEDIMSQNQQLLQQIIERDDHNTKLFMEGVKSKQSHDALHLEVRSLQRNLQHASTLMDLCNQKTIRLEDQLRGWSERLRRLSEDGMQQSISLGNYQKKLSGMHGEAPKLRQSMDVLQAKAGSNRLEIAELLIELENERFGKKRLEDDLDLMSSKANSLREKTDNSAVLQKLLHEAKEYRGILKCGICHDRQKEVVIAKCYHLFCSQCIQKPLGSRQKRCPSCGLSFGVNDVKPIYI

SEQ ID NO: 69458 - protein, 318 aa, Zea Mays
MPRGFLPTNDTLPKTLDALLSPRSRTYARLPSPGCRDASLFPSCSPPPNPRCAASTEPQPEPIPPSMPDHAPSPPTVPQTLDARLQRSPSPSPSRLQRRILPHHHQRRCQASGSSADDVKWSNIDVQEFIAFDPVYGPQTIYSELEHRTLRKLFKVDAADYMLSLCGNEALMELSSPGKNGSFFYLTNDDRYMIKTMKKSEVKRIAIAYLLAAVCEIWLKGDDDVDSGYGLLRRYRYQLFVGLVLSIAYSILLYGIYVPDWEYQIAGPGSSSTKKSFFVKCGVRGDTRPACNAVGMVDRTILGIDHLYRRPVYVRTKV

SEQ ID NO: 69459 - protein, 95 aa, Zea Mays
MYTARKKIQKEKGLEPSEFEDSVAQELKSDLKDLYINNAIQMDVTGSRKAVVIHVPYRLRKAFRKIHVRLVRELEKKFSGKWVCRISTGADVDSC

SEQ ID NO: 69460 - protein, 592 aa, Zea Mays
MALEDGSPATFTPQVIANAFVKQYYQTLRYAREDAYKFYNDKSILGRTDSNGKMICVTTIDDIKEQLVSTDCADCLIEIETVDAQPSHVDGVIILVAGYFTTAVVKQKFIQSFFLAPQENSGYYVLNDTFRLTGISFEVKVVAANHDNKSTQITTLPNEPEIDSFKESEVPGVPPAGNILVNDGVISTSANVVSPVKNDPVVETCVKVVNEDVVKIPVAAPASTPVTAEEVVNKDFVKIPESAPALPSSVEKAAPAPPASVEKAAAAPPASVEKGAPAPRTPVEKADPAPSAPVEKGAPALRAPVEKADPAPRAPVEKEVTRKTYASVVKIPREDTQPAPAARPSKPNLNIKMVQNTEKNVSSPSKPAHATVNALPGDKGVPKNKSPDALLCFAEPGYSIFVKNLPFEATVEMVEQEFSKFGAIKSGGVQVKCQPDQFCFGFVEFESQQSMLAAIEASRVYFGTRESYVEEKRTKTRVVDGVITRGDDNGNGGGGRFHSGRGGGYYGDGYKRQWGGQNNGYYNGADNMRNDYSGRVRGPQGNGHPQNGHGYHQNGHGYYSGNGYQQRRPNSNGNGLRVERNNGFRQQGPASA

SEQ ID NO: 69461 - protein, 694 aa, Zea Mays
MLTYPILNDRSIDQWTVTELKDELERRYLPVSGSKDELLKRLFEAMQDEILDGEGKTTVVTSPPEELKGGETPGSIDVSVNQASIEQHVHKGASEVAKQGVGLVISVTEAYDESTFATSEVTQEAVVGTAEVSQRSLDAVAEVESCLVDAAATDEPDGNGQGSASSGDTIVKEGSPRSEGHGNTIEKTPEDGTNKKIAVDDEPSDLTGGDIKLGLDVHSKILKLEDEPAPPHDMLHNHEDSDVVAVAEPEDDTSKKMISDDVPTGLMHTNVELGAKVDCKIEQEEVSTLSDAAALHSYPKEHIVAVAKGLALPRRMLMSGYTSNIDLDRKEESPDINSCEKLNLNRSSGDESMDEDVMERKHADSYIKPEDLRGKTKVTSEHVFKDVSLLDTRAEGSPAHSKEVVTEEKLSTPTEKRKLEDQEVIENNEPIKRQYLWNEDAVNISDQQASKITSTGTQKEVICPAPERSFGRPNTVARRNSPKERIVPPAKTSATTSLRIDRFVRPFTLKAVKELLGKTGSICSFWMDEIKTHCYVTYSSVEEAVATRNAVYDLQWPSNNNNYLIAEFVDPEEVKLKLETPPSQIPPISLSTATAQQTATFQQAMANQTLVPPHVPATSRGLLPTPARFAKVPPTSDPGPARESLPPPPLSLEPARTLDELFKKTQTYPRIYYMPLSEEEVSAKRAAHDKGRRG

SEQ ID NO: 69462 - protein, 62 aa, Zea Mays
MSSSSMWARALHSSSSPYAPMGSVNPSADMVLNANELIMRIFVGKGHNTSHAHMTLEAHGSF

SEQ ID NO: 69463 - protein, 159 aa, Zea Mays
MYGRRASQLLKEIDSSEAGQLVPFNSDVFDQVIRECNEHNSQFQSLIRYNRAEVIQSFRWKIGPVLPHDIQEKLHFSEKEYFKNHSAAIKSYISEMDIDLTVDMVPPKDPYIQVRVLEDIGEVSLGDHSVSLTKNSLHFLRRTDAEQFISQGLMEEFLE

SEQ ID NO: 69464 - protein, 337 aa, Zea Mays
MKTKTSRSLQKSGRGNHVQGEGPNWVLVAGGVLLSTLSVKVVCKLKQLLDGKQQNNTSEAKGRPEACKLHSDLYRFSDQTGCYYWLANGGVEVKQTPASPVPKSVESSLPLVKIPTPESSKENSGVMWISSPDRLEDPRRPFQYSNSSGSPCVSESGSDIYSKREVIQKLRQHLKKRDEMIMEMQTQIADLKNSLNIQVTQSSNLQSQLDAANRDLFESEREIQHLRKIIADHCVTEALSHDKPLQAAHWQPDAANGHSNGYGDGCVDDADLHCISIEKRKVEVERVEMLKKEVVELKEVIEGKDFVLQSYKEQKVELFSKIRELQEKLSAQVPIIL

SEQ ID NO: 69465 - protein, 119 aa, Zea Mays
MFHELVLFYYVANYLSFRGSLDEAYAGDLSFADSLQAFGAGLDDPISVAIGGPVMSKFTTAFRELGTYKELLRSQLEHMLSDRLSQFINVDLNGVKVNSPLFSPLETAQHSILVTIGCN

SEQ ID NO: 69466 - protein, 240 aa, Zea Mays
MQDFIPQFLDQLFPGAYISFSITELNKGTYRGRMTSFIQSIISSQLQKQVSLFTNPIWLVKTRLQLQTAKHHTSQYSGFSDALKTILREEGFLALYRGIGPGLLLVTHGAIQFTAYEELRKAMIFFKSAQSRADDAGGGESLLNSIDFAALGAGSKVAAILLTYPYQVIRARLQQRPGTDGTPKYSNSWHVVKETAKYEGVRGFYRGITSNLLKNLPAASLTFVVYENVIKLFKATKEKT

SEQ ID NO: 69467 - protein, 149 aa, Zea Mays
MLADFVRIPLEKAGGMMALVDVYCLFNRARGTELISPEDLLQACSLWEKVDVPVMLRKFDSGVKVIQTKTHSDEEVFARISSLAQKPDALQKGISPSDAAFTLGIAPALAKEHLLNAENKGLLCRDVSPDGFRFFSNLFNDIDPQNIHS

SEQ ID NO: 69468 - protein, 133 aa, Zea Mays
MPLTRVAADAFGVLTIALFALFAALGLFCIFQSVYFRVLLLGFSVLLKPGHVAFEGIIFLSFLMMLSCTTVGILLLVYYPVADSLALRDIGQRDIAEMVPYDDYYYEGTSLVANQSFREIERNSDTSTKPGSI

SEQ ID NO: 69469 - protein, 106 aa, Zea Mays
MGWTTGPISVTVKHTLGFRSPSPLLFRRLFALLSCSGGCACAAAHLSLSNTALHLPPRCQHLTVLDGGGPAAVCSGGGPAAISTKMSTSTDGNFNHCTFLLICAPS

SEQ ID NO: 69470 - protein, 241 aa, Zea Mays
MPASPPRCRRRSAPRPTPTPCGHASSRLTSPRSSTRRLRQDPRRSSSFASLKPMPSLKMASWETGAKSYMIAARAMAIIWVDTPDYWRWIVREDSRFSTCAELLAVCWLDISGCMPCRMLSGDTRYAAYLVFKMADDCFGLDSPLQEASVSVGEGGTSTAHWIRLQSYHVGDEENGVTEEGAPPRLPHERPDGWMEVELGDWYNHGGDDDLVVRASVKEARFGGNWKKGLIVQGLEIRPKN

SEQ ID NO: 69471 - protein, 320 aa, Zea Mays
MVYVPEGQFLSRIGPTEFLKVYMFAEWYKPGCLLEYPLGGTGAIIDALVSGIEKFGGRLALRSHVEKILIENGRAVGVKLQSGQVIRAKKAVVSNASMWDTLDLLPPDAVPKSYEDRVKATPQCESFMHLHLGFDAENAREDLGIHHIVVDDWNKGVDGEQNVVLISVPSVLSKDLAPPGKHILHAYTPGTEPFSLWEGLDRKSAEYRRLKEERSEVMWKAVELALGPKFSREKCDVKLVGTPLTHRRFLRRNRGTYGPAIKAGEATFPGQATPIPQLFCCGDSTFPGIGVPAVAASGAIVANTLVPVSQHSELLDAVGI

SEQ ID NO: 69472 - protein, 143 aa, Zea Mays
MQTCRWTRSSGRVSLTTCSPRCSPVCRPSSSSVARRPSFATGPSSPRTPRCPPTHGPCLLTFSRGGSGAHSPPPMHCSVLSIPLHVRYKLPFGFLPPWDLWLVGSSGGLVCFSGFNGGASFRTVVCNPLTRAWRVLPDMHHNQ

SEQ ID NO: 69473 - protein, 1152 aa, Zea Mays
MFTPQGKGWTGWSTPTPANQRSGGGAPAASAPLGKGKGRVAELEQELHEYQYNMGLLLIEKKEWAAKFEEISEVLTQKEEILKREQAAHLNAISEYERREENMRKALGVEKQCVADLEKALRDIRAEIAEVKFTSEKKITDAQSLEASLEEKSLEIEGKLHAADAKLAEANRKKSQADRDLEEAEARQRRLEKEKLYFETERKAREKQLKEQEESLQEWEKKLKESQNRLNELQRSINEREERANKNDQLFKIKQDELEEARRTVEAAKVTLKVKEDDINKRLNELHLQEKDADSKRSALEEQGKKLDEREAKVTNREKKLLEDHQVELESKRRDFELELERERKSFDQNMTQKQADLLKREKDVKSLEAKLSKSEQALNDKKKSMENLQNDLDAKSKALKSWDESLKNDEKRLLKEKQQMDHEREQLETYKLELEKIKSALEAEKEKISEEQNNLKLTAQERQEHSLLIAKLKKEIEEYRMRSNSLSEEMEDLRKQRQKFEEEWEQLDEKRALLVEEDKRLNIERMNLERWRDNEEKRLNDMKLKMDEEYKQQLESLERKEKALSDDMKHKQMENDEFLKGERADVQRKLQLKRHELEMEMEQKQATKEKELEEKENELNKKIDFVENKLRHAIELNESKIEKLLLEKREVQMERELLLEERKKTETDKADIRRDIESLHSLSKSLKERREAYNRDRSRLIELFEKYKACKNCGISIFEGLDSLLLKDSAEIEHPSLAVEGDDHALTTDTSGPDTGTLVNSGGRFSLLQKCSRLFKFSPRKKGEQSSEQPSERNISFGARLEEATQSDGDYVPTPVYEIAHDSFNAEDELPSDGETRENEESERHDIADNAQMESSVGVADNSIDILGTKSFDGANDMAVEATIVSVDQNGEDSVVPAEAGVEPETSEQGRRQQNQRGRRKGGMKRTRSVNAVVEDAKMILGEVFEEKTDDQGDTVKVGATRKRRFAGATISEQDEEGSEAHSESVSLGGQRRKRRQTAGAVTDAPGERRYNLRHSRAANAGAATAQADKKKSSKARNKHTVEASADDTEGTSKVVEEPAPESKRVSESADYDASQLHEFSQVEVGDAHAVDGEGAGEEDGDILDGQDALPDVPMTPSGSEFGAEQEDEDDDDSERRNQSISKKLWSFFTT

SEQ ID NO: 69474 - protein, 187 aa, Zea Mays
MMATGARLRAGLPRDDAPPQQEMVAANGTGQPQLVVDEHKTILEEVPREENGTLSAANYAAQGHENVAAEYYKQQEEQEKVVRSESLAIWLSNIANMVLFAAKVYASTCCHDISCGLLPFQCKRQIPIETQLEKRMQPLNQGMQVGIAWLVIRGLICSGFHVGIKELAEVSFPQDDKQTEKTTLKVT

SEQ ID NO: 69475 - protein, 803 aa, Zea Mays
MVKFSREYEASIIPEWKAAFVDYRCLKKLVKRIKIARRDATREAGGGSSSDATSSYGFSVLDPVRALAAHFASATPPAVSPANGDEEEEDDDAESLEPDSGELVVVATAKHEREFLEKAGEELEKVNKFYAAQEADMLARGAALVEQLRILADVKRILANHAVASRRSRPAGDSPPPPPSADGRSNSGRHLLSSSSPFLQASPQSMLDGSAELPQARVAEEVMAALERNGVSFVGSGLGSKAKKDGGGKQLTGRAAALPATVRIDVPPTSPGRAALKVWEELVNVLRKDGADPAAAFVHRKKVQHAEKSIRDAFLALYRGLDLLNKFSSLNVKAFTKILKKFVKVSEQQRKTDLFSEKVKRSPFSSSDKVLQLADEVECIFSRHFAGNDRKVAMKYLKPQQPRNTHMITFLVGLFTGTFVSLFIIYSVLAHVAGIFSSTGNTAYMEIVYHVFSMFALISLHVFLYGCNLLAWKSSRISHNFIFDFSPSTALTHRDAFLLSASIMCTVVAALVVNLFLSNAGATYANALPGALLLLSAAALFCPFNVFYRSTRYCFMRVMRNIMLSPFYKVLMADFFMADQLTSQIALLRHLEFTGCYFMAGTFTTHAYGSCTSSSQYKNLAYVLSFLPYYWRAMQCLRRYLEEGHDIDQLANAGKYISAMVAAAVRFKYAAAPTPFWMWMVIVSSTGATIYQLYWDFVMDWGFLDLRSKNRWLRDQLILKNKPIYYASMMLNLVLRLAWAESVMKLRLGMVESRLLDFSLASLEIIRRGHWNFYRLENEHLNNAGKFRAVKTVPLPFRELETD

SEQ ID NO: 69476 - protein, 53 aa, Zea Mays
MKLLMKYSITLLKEFLELSCNNVTRVVLRENRDLRMSLTTLWSTHLVLPRLQI

SEQ ID NO: 69477 - protein, 240 aa, Zea Mays
MIHQVLAFSLQISHSMWTESLLKLIGSSFVPDLLSSKRSSRQTGKTGRKLEVAVDDMENLARACKVCKCEELQKVLDKEVVHQKYAEYKSARELDMDSSQKRFILQAQSLPEEDRLPSALQRILQTCLANSREGYCSEESNEMIRNSEDDDLADLYIKVGDKVFHCHQVILASRSEYFRARLSRTVDFLEGNCGFEAAQNVPLLEEHDISAEAFEKMLEYMLKNYLMLHQGTCCFPLSGL

SEQ ID NO: 69478 - protein, 364 aa, Zea Mays
MQGFTEKIVGMMKSENLFASQGGPIILSQIENEYGPEGREFGAAGQAYINWAAKMAVGLGTGVPWVMCKEEDAPDPVINACNGFYCDAFSPNKPYKPTMWTEAWSGWFTEFGGTIRQRPVEDLAFAVARFVQKGGSFINYYMYHGGTNFGRTAGGPFITTSYDYDAPIDEYGLVREPKHSHLKELHRAVKLCEQALVSVDPAITTLGTMQEARVFQSPSGCAAFLANYNSNSYAKVVFNNEQYSLPPWSISILPDCKNVVFNSATVGVQTSQMQMWGDGASSMTWERYDEEVDSLAAAPLLTTTGLLEQLNVTRDSSDYLWYITRWRQASVSQCAVCWSCLACLCQWTTSRFCLWYQGRSKNQI

SEQ ID NO: 69479 - protein, 190 aa, Zea Mays
MGEEASCNAASAMEAATNARPAKENGRAPAVAEVVAQEAAADPRLQGISDAIRVVPHFPKHGIMFNDITTLLLRPRVFKDAVDLFVERYRGMRIDAVAGEVISEKYVLEYGTDCLEMHVGAIERPGERVLITDDLVATGGTLCAAIRLLERAEADVVECACLIGLPKFKDFYKLNGKPVYVLVESRESDK

SEQ ID NO: 69480 - protein, 380 aa, Zea Mays
MAWLPSLGGFLSFRPTLFLRTLLFQSVVLGSSSSPHKHNGIVPTILENRRTWKASQQEYGVHGEPDRDDEPHPARLHRPRRPRRRKRLAHPLGVAPNHRRRRRPGIVTRRPLVLQLQQTEDGSQEYAEFLHMPKRRFSDFVVNLTMIDLPGLTKVAVEGQSESIVQDIENMVRSYVDKPNCIILAISPANQDIATSDAIKLSKEVDPTGERTFGVLTKLDLMDKGTNALDVLEGRAYRLQNPWVGIVNRSQADINRKVDMISAREKEREYFETSPDYAHLSSRMGSGYLAKLLSQHLESVIKAHIPSITATINKTIDELESELDIIGRAVAADPGLNCTPYWTSAVLLTVFSRNILMEGWHHHPYFASCICFASCELLVA

SEQ ID NO: 69481 - protein, 456 aa, Zea Mays
MEDAGREGGTAAENGTEGEGYVLVKAAPEGEGDPTAAAAGGDREDLAASAPAMAMAVAAADEAAAPAKKGGSGATKARLQNGRVPAGTSAAAAAAGPRVKKPGVLSQSASFPARGAVAVAAKKAAAAVATPKQAKGAVPIGSETAAGRAVEKKASLARTPVARRPMLVKSGSVDAAAPNDTVVAVQESDENTDKPLKQTQPGKTEDDVHSTTSSTNTPRAAARKSAAAAAAGFSFRLEERAEKRKEFFQKLEEKIHAKELEKTNLQEKSKESQEAEIKLLRKSLTFKATPMPSFYKEQPPKVELKKIPPTRARSPRLGRHKAASSATAPAPADGSVSCGSPRSTANSGKVNEIMENIKPRVPARKSIQRPVTKTPLQVSATTKAEPRPIATKPKIANSKPKVSRAKVAQAQGNSAEVPPSEPSASEELVVEHGVGEATGPDLASQLVASNEVPVHG

SEQ ID NO: 69482 - protein, 249 aa, Zea Mays
MTLDYYAYQAKKFRNTWNILYFGHFGRFEDTTRIPPMRFTEKPPDSPAYPRTTLQVFSIKVAGIEGGLQWPLHVFGKVALRDAVDHNRNMVFDRTRDNCQILTKEVPNLKLTGPSRAVLLVDPVTIEADLKVKGRTESEDKHLSFLAVPFLVMIPLESCLRTRDFTSKLSTLRFALAIVVLSVEATISVRVRGGSWPDGLRAQFAAHTVSIGREEVVLLDSGDDKLPVSDDGTIKLGRRVASQKKKKYQ

SEQ ID NO: 69483 - protein, 3737 aa, Zea Mays
MVDSWPIKPYCFYVVKYAATNLSLCRTGSSKDEEDSKSFTDEDWERLNRIIGYKETNEYVTDQQDMKLMQFDFEIRMKHNASKLTIDDSECLADLSCQDFCCNLKMYPEAKIFDLKLGSYRLLSPYGLLAESASVIDSFVGLFSYKPFDEQLDWSLTAKASPCYITYLKDSVDQIVGFFKSSPTISQNLALETAAAVQMTLDEVKRTAQQQMTRVLKDQSRFSLNMDIAAPKITVPTKFRPDDVHETKLLLDLGNLVLRTEEIWDAYTSEEQDIYLNFNLVLSDVSAFLVDGDYHWNETSDEKNLLPVIDKCGIALKLQQIQLESPLYPSTRMAIRVPSLGFHFSPARYHRLMEILKFFQDGASDNSNSDHEHLWDHADFEGWSSLLTWKGVGNREAVWQHRYLRLVGPFLYVFENLMSTTYKQWFSLRGKQVHQILEDTGALILLFDNDEGRKIWQNRLQGAIYRASGSAISSFPGVALPSEAHSFKGNFLDVADTEKLFVAGILDELKICFSCGYEVELSMKGGNLLIGTILGSLEIEDQYYYPGSPVPRFLARSFINSMQTQELPSLSRKNSAGPRNTPLMKNDSEENFFEASDDFDEFETPMHQKRTISDYFSTQKFLPTSVPSLQPPTFKRIPDLIPDTELQTGKFTLEGSGTFNSFVKAQIVIYDQHSPQYNSLDNRVVVTVATLSFFCHRPTVIAIMEFMNAINLANGSDTDKDKSTYPATVEDSAIEESKSDLESEPSIKPLLAKGKSRIVFHLTSSMAEAQILLMNENGDRLATLSQNNLSTDIKVFTSSFSIKAALGNLKISDDSLLSSHPYFWVCDMRNPGGRSFVEIDFSSYNVGDEDYCGYDYSLVGQLSEVRIVYLNRFVQEIISYFMGLVPKSSDAVVKLKDNKTNSEKWVSKTDMEGSPALKLDVSFSRPIIVMPRETNSNDFLELDVLYITVQNEFQWIGGDKNEMSTVHLDILTVTVRDINLVIGMNMVRGETIIQDVEGLSFELRRSLRDLRHQLPVVEAAIKVDVLKATLSNREYEIISECALSNFSETPHPVPTLDDPRYGTSTTPSHVSASSSESIHVLSEGAETWIANKFSVSINLVELSLHSGSTRDSPLASVQASGAWLFYKSNTRGENFMYATLKGFSVFDDREGTKDELRLAIGKSASVRDTSSVDGYDNPNELDSGERRIQKDLGLEPIPSMLILDAIFRKSSSSVSVCVQRPKFLVALDFLLAVIEFFVPSAQSLLSNDEDKDLLHMITPVVLNDQIYFQEHSTFSLSPQKPLIVDNERFDHFVYDGKGGKLYLLDSEGKILSSPCTESFIHVLGCKRLQFRNVTIVNGEYLDSCISLGDDSCYSASRNDHVYLVREDDGSLSTPSKEIRGDSVKNGSADISTEFIMELQAIGPELTFYSTSRNAGENLALSTKVIHAHTDAFCRLIMKGDSMEMNGNILGLKMESNGIRVIEPFDMVVKYSNASGKTNLHLLVSEIYMNFSFSILRLFLAVEEEISAFLRMSSKKISLVCYQFDKVATMQGNANDQVLSFWRPRAPSGYAIFGDYLTPMNEPPTKGVLALNTNIVRVKRPLSYKLVWQSGSPRTNIFHQKDLEDKISNIDQLCSVWLPVAPAGYVAMGCVASSGTAEPPLSSAFCLTASLVSSCNLRDCIALRDNTNMIFWRVDNAFGSFLPGDPASMSVDGNAYDLRHMLFDSADSSSKTVSRRQDSRNDFSQLERSELTSGRLFDAVASFKLIWSNSGTSSPKKLSIWRPMLSEGMFYFGDIAVNGYEPPNSTVVLRDTGEDTFLRAPEGFDLVGRIKKHRGTEGVSFWFPKAPSGFVALGCVASKSSPTKEDFSLLRCIRNDMVAGGQFSEESLWDSSNARTSEPFSLWTVDNDAGTFLVRSGYRKPPKRLALKLAGPPTSSSSDSIIVDAKIKTFSAVSFDDYGGMYSMQMVPLFGVSFDSVGLSYHGGPHHLNATVSLSFVARSYNDKYSSWEPFIEPTDAFLRYQFDMNTPGSPRQLRITSTQDLNLNISVSNTNMLSQAYASWNNISCGDELYKKETFSSTERPVLDVHQRRSYYVVPQNKLGQDIYVRTTENRGSLVTLLPSGDDRSIKVPALRDLSDSHLNGRSVKPYRLMITAILADAELKLLGSLNSLSFWVELASVSTLTWFPSQVKDDEGLETGEYMTAVRLFSENHSISVQQQSARTCAAIGEHLSQNTRKVNWNEMFFFKVERVDSYTLELLVLDAGKGQPVGIYSAPLEQVVQKLPPTSNPDSVKFDLALGDLMSTKTVEQETVKPSGKIRFAVLVSGRASVQQGNRASPESKTGYIQISPSKEGPWTSMKLNYAVPAACWRFGNCVIASEATVKEGNRYVSIRSLVSVTNTTNFIVDLRLKGRISQSARADEQGDSFGKEDQILIGTLEPNSTIPVPLSGLSHPLMPYMLQLRPAKHHDHENYSWSDVQERRSQTEFRKEEILDLCISDLYESENLLFCSQVDGTSNSCHGLWFCLSIEGKEIGKDVQMEPIYDWCIIIKSPLCLTYYLPIAAHYTVSSSHLDNEDSSCSLGTLSPGEAVKVHNVDPRNPLYLSLVPHGGWELMHEPVVISHPTQAPSKFINLRSSLSGRLPTLTLRLIDISGRKEKRRLLSRSHLERGEKQLYDIKHDELVEGYTIASGLNFKGLGLLSSVGHGGRFGSVKELSPLGDMDGAVDLSAYDDDGKCMHILLCSKPSSYQAVPTKVIHVRPYITFTNRAGQDLYLKLSIEDEPKVLHAYDWRVSFMYSKGTTDKLQVRLVDTEWCQPLEIVKEDTIVIAMRKQGGTQKFVKAEIRGYEEGSRFLIVFRLGPAYGPIRIENRTSHTTISTCQSGLGEESWIQVKPHATRKYSWDDPYGQKVIDVSIDKGDDTCVLCVDLENPIGSSTSFREHGLMFTVDTSDIKILKFADYIRKEEVYGLPGSELTDHQGSSLKENETEPGAGPLELIVELGVVGISLIDHKPRELLYLHLQKVFVSYLTGYDFGTTSRFKLILGELQLDNQLPLSTMPVVLSTESRPDSNRSVFKANVAVSNVTSNGIQVYPHVYIRVTDQTWRLNIHEPIIWALFDFYSNLRFVTTINSTTVTEVDPEIRIELIDISEIRLKISLETAPSQRPRGVLGIWSPILSAVGNALKIQVHLRKVMHRSRFMRKSSIIPAITNRIKRDLIHNPLHLIFSVDFLGVTKSTLSSLSKGFAELSTDGQFLQLRSKQVWSRRITGVGDGLVQGTEAFAQGLAFGVSGVLRKPVESARQYGVIGIAPGIGRAFVGFIVQPLSGALDFFSLTVDGISASFMRCVNILSNKSVPQRIRDPRAIHRDGIVRDYDKFEAAGQMALYLAEASRYFACTDLFREPSKYAWSDYYEDHFILPSQRIALVTNKRVMLLQCLDLDKMDKKPSKILWDVPWEEVLSLELAKAGYQRPSHVIIHLKNFRRSENFVRLIKCNIDNEREPQALSLCCSIRKMWRSHQAAMKVIPLKVPSGQRHVYFVSDDDKKESHSLSRPLLSSGGTSTDVEQQFINNTVHFQKMWSSEPEIQSRCKLVAKQIADDGRVFSIWRPLCPNGYVSIGDIAHVGIHPPHFAAVYKNINGNFALPLGYDLVWRNCAEDYKSPVSIWLPRPPGGYVALGCVAVPSFKEPTLDCAFCVDERLAEDAAYEEQIIWASSDAYPWGCYIYQVQSASMQFMALRVPKEQSELRPKKILESFLQQASETQTSRA

SEQ ID NO: 69484 - protein, 382 aa, Zea Mays
MGMGSARGGAGGWLPGERWRRVIFLALAAVSFLISLILLFLSAPRLRLPSVVLPYTTASASAVRRGPGEPPCLVYLLTGARGDGRRLLRLLLAVYHPRNRYVLHLSADAPDDERLSLATGVVAAAPAVGAFENVVIIGNPTAGTPVGSSGLAGTLRAAAVLLRLHADWDWFLTLNAADYPLVTQDDLIHVLSSVPRDLNFIDHTGDVGSKEPEKVQQIIVDAGIYLSGRTNFFRGTQKRAAPEAFKFFTGSPWVILNRQFIEYCILAWENLPRILLMYFNNVIQPQEGEHYGHMVDSGAPFARPFQENDPLLDQIDGNILKRWSHGPVPGAWCTGRKRWFSDPCSQWGDVNVLRPGPQAVMLHQYVNRTLEEAKSSSNSCRR

SEQ ID NO: 69485 - protein, 190 aa, Zea Mays
MTSTCAARVPSLRWAPQRGWVGSWVSVRPAKCRTSGGHAVVCAAVSFRPCIDIHKGKVKQIVGSTLRDLANDSMELVTNFESDKSPAEFAKFYKADELLGGHVIMLGANPSSQAAALEALRAYPGGLQVGGGINLENAMSYLNEGASHVIVTSYVFSDGKMNTERLRKLVELVGKQRLVLDLSCRKKVRN

SEQ ID NO: 69486 - protein, 310 aa, Zea Mays
MLDLAAACADLLVESDIDQAICVSHTSKENTVLRSGISPEKVFMVPNAVDTAMFTPSPKRLNCDEIVIVVVSRLVYRKGADLLVEVIPEVCRLFPKVRFIVGGDGPKRVRLEEMREKFSLQDRVEMLGAVPHAQVRSVLISGHIFLNSSLTEAFCIAILEAASCGLLTVSTRVGGVPEVLPDDMIVLAEPAPGDMVRAVKKAIDMLPGIDPQIMHLRMKELYSWDDVAKRTEIVYDRAMESPTTNLLDRLPRYLTCGSWAGKLFCLVMIINYLLWRLLEFLQPAVGIEEVPDIGPLHAHLGSRNDEAQEK

SEQ ID NO: 69487 - protein, 384 aa, Zea Mays
MAARAITRRRKYLFDHVKTPNLSSSSSTFQHGRIGSEDEPKITLLFLEQSSRDSRSEKEQYCVNLTNRNLAGIANRFLRRPAHGISLSYYGIGKNDFGLPLGARSMLQSVRASSTATAGQPKLDIDDEQSGDQKQNRKKKETSPEECDQAVEGLSTAKAKAKAKQVQESLKASQSAMQKFWARLLGIGPALRAVASMSRADWAAKLKHWKAEFVTTLQHYWLGTKLLWADVRISSRLLVKLAGGKSLSRRERQQLTRTTADIFRLVPFAVFIVVPFMEFLLPVFLKLFPNMLPSTFQDKMKEEEALKRKLKARMEYAKFLQDTAKEMAKEVQTSRSGDIKQTAEDLDEFLNKITLGKYVQIYGYPAFWYRSLLEVHASQKTARH

SEQ ID NO: 69488 - protein, 232 aa, Zea Mays
MQKLGKKRASLVDIAESFKSRGNEFMRSNQHLKAVELYTCAIALNQQNAIYYCNRAAAYTLLNMNNKAIEDCLKSIEIDPHYSKAYSRLGSAYFAMGNYHDALYKGYLKAAELDPSNENVRQNIEVTKKKLAEQRVPPEEQNTHAGQAQGPHPIFTSGGVPFNLFPPGNEGTQARQASNGLEGEHGEPGIHRDDDVHINLAGPEQAAEALRAVMQMLGPQMGQHEGAPRGPG

SEQ ID NO: 69489 - protein, 223 aa, Zea Mays
MHWAVWKAFKHSPASLGLLIYCFIALWFVGGLTGFHLYLISTNQTTYENFRYRSDSRPNIYSQGCLNNFLQVFCSKTKPSKHKFRAYAQEEVRPPTVSFGREVDEEPVGGPRPKVEDDLEIGTDLLKISQRRNYEDVDAETGGRRSRSSEVEGTASARPAVACSESQIPAVGGTDVRVRHSSWDRRSGNWDMSAVLTRSASDVIGRSSVFAADAARPSLEETR

SEQ ID NO: 69490 - protein, 422 aa, Zea Mays
MLACIACSSKEGAEDGSRAAATTTTPHGKEAVKSLTSQLKDMVLKFSGSSKQCKGTAGTQSFRSSGDRYRRPYPGFIDDTGFTPASKVLGEDYYPRTALAGAAGAAGGARTASSDTLDMGRSNRKSPGSSGWIPGTDEAAAGGDDVLALEDAAAPREWTAQVEPGVQITFGTIPTGGNDLKRIRFSREMFNKWEAQRWWGENYDRIVELYNVVMFSGRQQGCSTPVSSVDDLALRDSSYSRGGSTSRGSPITAPPPPPPLPPVASKEPITRSASYKATAAGSSSAPYAAAHSTRAAAAYFPSAAVPDPSDHVWAHHFNMLNSAAAAAGTSAAMGGGAPSSYDPSRATTSSRDEASVSLSNVSDLEATEWIEEDEPGVCLTIRELGDGTRELRRIRFSREIFGEDRAKVWWEQNRERIQAEYL

SEQ ID NO: 69491 - protein, 97 aa, Zea Mays
MAPSRLASLVLALPQCPGSCFPRRRAPIPCTRSFSSTGAPPCARAPSLSRRSVCASLRPDPLPPARRPSLPRCPLSHLQAETPAMKLPGASSPGAQP

SEQ ID NO: 69492 - protein, 684 aa, Zea Mays
MAVILYHLHDYESALSVLDPLYRNIEPMDEPTALHVCFLLLDITLALQDATKAVDIVQYLERSFGVANTMNPNENASIAQQQLAQAKPPVKISMPPDSDSNAYAGGYENLSSGIFPDEQIEFESLCSSFDGHQNVGRRILNDFSRASADLAATAADLKVRLQIYKVRLLLLTRNLKVAKRELKVLMNMARGRDSSTELLLKSQLEYARGNYRKAVKLLSTPNNRTEPAMLAIFHNNMGCILHQQRSYHASIWCFSKALKYSLSFRSEKPMKLSTLSQDKSCLISYNCGIQHLMCGKPLLAASCFREAMPLFYKRPLFWLRFSECSLLALEKGLLCANGASSFNDEIEINVVGSGQWRQLIVNPVNSRSNLDSAGVTLGEHKNLVSLGFARQCLQNALLLLDATEKENWVIASDTEDWDQGTVHGYKSSGQKNTTSTDSKTPSGPTLANVNGEQKGTSLNATLQSSLAFYDEIRRKEYIKIRQAVLANLAFVELCLDNPLKTLTYAKSVLQVTDCSRMYAFLSHVYAAEALCTLNRTEDAAENLSVYIRDGNHVELPYSVENSEKALVEKDSDGEDLVAPAVTKLATEEPEQLRPEEARGVLYINLGMIAARQGEVEKANYMVSRGLAMLPNNPRAVLASVYVDLLQGKSQEAVVKLRRCRNVRFRPASIAASSQQSSLEKPPLS

SEQ ID NO: 69493 - protein, 150 aa, Zea Mays
MANSSLRAEVVCSSRPAQLLLLVPRVRVRPSSARILPEPEQSSVHGRRRVPDARSAVWLPRASSLFPRLAPSPKSHGARPQCRSLSPAALAPCIHGDFPLLELARPEFPVAASCRAWLRARASPCVPRCSLRAQPQFPVRALHCSLGEFL

SEQ ID NO: 69494 - protein, 447 aa, Zea Mays
MLLQPIPTATLAARPRSSEASFPFRCHRRRRVLLPVRADLTPISLSASAPSRPAKPAVCTADELHYASVDGAGWRLALWRYRPPRNAPVRNHPLMLLSGVGTNAVGFDLSPGASFARHMSSQGFDTWIVEVRGAGLSMREYDDSTPSGSVTFEDVSSGIQPLNSTFEATSIQSSGGYASDCDDLGIVALDEPPLLAELSNFFDRISKLMEEAVVNGNFHEITEKVSVLSEMVESSTIIGPVREESLRLLKNFQDQLDSWERFVATQMDLTSEYNWDFDHYLEEDIPAALEYIKQHSRAKDGKLLAIGHSMGGILLYAMLSRSGFEGVSSNLAAIVTLASSVDYTTSNSSLKLLLPLAHPAQALNVPAVPLGTLLAAAYPWASGPPYLFSWLNPQISAQDMMHPELLAKLVSNNFWKVGCATEMEPSHTRIICESVRLLSLHWLEIKT

SEQ ID NO: 69495 - protein, 532 aa, Zea Mays
MMSFRSKDAHAQTRLNWPWRSQSPLSAQLLVDIPPEIELSDYRRLPSSRSESPSGLLHDEGVKEEPIPDLDIFFERLYEYFCAKGLRCIITKWIIEILNVLFMVCCIGFFFLFVDWDTLIHLKCGVEALESGEKPCDLMKAIKHDPLVPFTLPKMITVGSMVIMTAYGLTNFLKFFVQLRSTLNVRQFYYDRLKVNDLEIQTISWPKIIEKVVLLQKSQKLCVVRDLSEHDIIMRIMRKENYLIGMVNKGILSFPIHSCVPGAGPTGSHEHGRRNYLILPKSLEWTLNWCIFQSMFDSKFCVRKEFLTSPDVLRKRLIFVGIAMLILSPCLVIFPLVYVILRHAEEIYNHPSTASSRRWSNLSRWIFREYNEVDHFFRHRMNNSAVHSLNYLKQFPTPLVSIMAKFVSFVSGGLAGALIIIGFVGESILEGHIFGRNLLWYTIVFGTIAAISRKVVADELQVFDPEGAMCLAVHQTHYMPKRWRGKENSELVRREFETLFPYTIIMLLEEMASIFITPYLLISEVPKTSQYM

SEQ ID NO: 69496 - protein, 288 aa, Zea Mays
MSPAASAPVFSHLGPLIPPPTPMLSTLLRHRLTAAASSSSPTHSTPLRLRPLAAAMSSSASAPHGGRKPNRLAAEHSPYLLQHAHNPVDWYPWGEEAFQKARAKDVPIFLSIGYSTCHWCHVMEVESFENEEVAKLLNDWFVSIKVDREERPDVDKVYMTYVSALHGGGGWPLSVFLSPDLKPLMGGTYFPPDDNYGRPGFKTVLRKVKEAWETKREALERTGNLVIEQLRDALSAKASSQDVPNDLAVVSVDQCVEKPSNKASVSPTISSSFPELLLQRFYDYADMY

SEQ ID NO: 69497 - protein, 702 aa, Zea Mays
MAAASMDVEAGQGRNDKKRIYKDLLLAYKTLGVVFGGLVTSPLYVYPSMNLTNPTEEDYLGIYSIMFWTLTLIGVVKYICIALNADDHGEGGTFAMYSLLCQHANIGILPSKKIYTEEEQGLVPARPVAARRPSKVRRFIERSITARRLLQLTAILGMCMLIGDGILTPAISILSAVDGLRGPFPSVSKPTVEALSAGILIGLFLLQKYGTSKVSFMFSPIMAAWTFTTPIIGIYSIWRYYPGIFKSVSPYYVVHFFVTNRKRGWQLLGGTVLCITGAEAMFADLGHFNKRSIQIAFLSSIYPSLVLTYAGQTAYLINHVGDFGDGFYKFVPRPVYWPMFVIATLAAIVASQSLISATFSVVKQSVALDYFPRVRVVHTSKDKEGEVYSPETNYLLMLLCVGAIIGFGDGKDIGNAFGVVVILVMLITTILLSLVMLIVWGTHVVLVALYLVPFLILEGTYVSAVCTKIMKGGWLPFAISLVLALVMFSWYYGRQRKAEYEMANKVTLERLSELLAAPDVRRAPGLCLFYSNMQEWRWLTPVLAHYIKNMRSLHGVTIFVTLRYQLVAKVDAESRMAVRRFGPRGVYGCTIQYGYAGPLYEEEEEDLAGQVVRAVRQHIEREAAASSTAEVEEEAAELEEARAAGVVHVMGKTRFHVGRNTGLFDRVLLGFYEFLHTTCRSALPALGIPLQQRVEIGMLYKA

SEQ ID NO: 69498 - protein, 353 aa, Zea Mays
MAGGGGGRDLPSTPTWAVALVCAVIVLVSVAMEHGLHKLGHWFHTRQKKAMREALEKIKAELMLMGFISLLLAVGQTPISKICIPAKAGSIMLPCKPPKGAAAAADDDKSDGRRRLLWYPPYPGYDEPGHHRRFLAGAAPDDNYCSDQGKVSLISSAGVHQLHIFIFVLAVFHIVYSVATMALGRLKMRKWKKWESETNSLEYQPFTVPVHAPDVVREAAPGPLEHPWSEMGRGVLQAVLRVRDQGGLPDHAAGVHQLPSVAQHQVQLPAVHQAVLGGRLQSRRWHQSPAVVRRHLHSLDRYQGIRHACLDLFCPARYTPASWGQAGGCHHGDGQGDTGQGDGHQGGACGGAK

SEQ ID NO: 69499 - protein, 259 aa, Zea Mays
MGLGEAAGRLLAAVDWEREAYPAYDDFLALPVFVLFFPTVRYLLDRFVFEWVARRLINRNGHQSTNNETEEGRKKIRKFKESAWKCVYFLSGELLALSVTYNEPWFTNTRYFWVGPGEQVWPDQKIKLKLKAVYMYAAGFYTYSIFALMFWETRRSDFGVSMSHHVATVVLIVLSYVFRFARVGSIVLAIHDASDVFLEVGKMSKYSHCDWLANVSFLFFVISWVLLRLTYFPFWILRSTRFAPLQCWSGSQFLCCGAC

SEQ ID NO: 69500 - protein, 409 aa, Zea Mays
MAASLAAAASRLAATGGELSWSARPCPGSLVASFPSAGRLRRPASGVRCGGGVLPAAAGTGAEAEEGGRFVGWFREAWPYIRGHRGSTFVVVISGEVIAGPHLDGILQDISLLHGLGIKFVLVPGTHVQIDKLLAERGKKAKYAGRYRITDSDSLDAAMEAAGRIRLTIEAKLSPGPPMLNLRRHGVNGRWHEISDNVASGNFLGAKRRGVVGGIDYGFTGEVKKIDVSRIRERLDRDSIVVVSNMGYSSAGEVLNCNTYEVATACALSIEADKLICIVDGQIFDEHGRVNRFMSIEEADMLIRTRAKQSEIAANYVKVVDEEDINHVRCLPMKHGTEHGMNGRDHINGYTASFRNGVGFNDGNGLSGEQGFAIGGEERLSRSNGYLSELAAAAYVCHGSSIPGFQQCS

SEQ ID NO: 69501 - protein, 307 aa, Zea Mays
MPVILREMEDHSVHPMSKSNHGSLSGNGYEMKHSGHKVCDWDSSSKSDRSHQEASAASESSPNEHTSTQSDNDEDHGKDNQDTMKPVLSLGKEGSAFLAPKLHYSPSFACIPYTVDAYYSGVGVLTGYAPHAIVCSLLIFQFLSSWPHSVHPQQNDTTNTPGMLPVEPAEEPIYVNAKQYHAILRRRQTRAKLEAQNKMVKNRKAAKEGEPFWDSPWGRGRPGWHIECSAMSAHYLGHVFDIHGGGKDLIFPHHENELAQSQAAYPESEVKCWMHNGFVNKDDKKMAKSDNNFSRLEMYLTYFRFKL

SEQ ID NO: 69502 - protein, 538 aa, Zea Mays
MSLDQLADPANSTCAQVIHSKSEICSHRWLPGSSNRNCKKQKYTNDDFKGKDLEIDGPGNLYMDHQSSPNERPIKAADHENNSKESMMGNLGDATVRAADLIGSMAKNMDAQQAARAADTPNFSSEVPEGKGKNDDFKGKDLEIGGPRNLYMDHQSSPNERPIKAADHENNSKESMIENLEEPTVRAADLIGSMAKNMDTQQAARAAEDTPNFSSKVPEGKDGANDTVNDDEQRNSALRRSNLSAFTRYHTSAASNQGGTGLVGSCSPHDNSSEAVKTDSTYNMKSNSDAAAIKQGSNGSSNNNDMGSTTKDVVTKPSTNNERVMLPSAIKANGYTSTFHPVQQWMVPDNATAGKAKADEVANNAGRNSHPGDVQSNLTQQHRPTLHYVHFENSGSGALQCGSSNVFDPPLEGQATNNYGVKAGSNSGSNKGQNNGSTAGASTAAANAGRTDTEIRAIDKSGPGGGSGSGNDTYVRRLAASMTPRQEQLKKYREKKKDRNFGKKVRYQSRKRLADQRPRVRGQFVKQAVQNQEGDGER

SEQ ID NO: 69503 - protein, 104 aa, Zea Mays
MFKLMKRCELVDARIYDLLIEKLCRIGRFEIGRELWDEATNSGLVLGCSQDLLDPLKTEVFRPICPAQRLSPQNYKRLAWKKKVTAVGVKKDIAISASRKKSGV

SEQ ID NO: 69504 - protein, 87 aa, Zea Mays
MKFAEQDSDGSAQSTADMTAFVQNLLMQMQTRFQAMSENIISKIDEMGARIDELEQSLNDLKAEIGGEGMSTPSKMKEESRPSDSSA

SEQ ID NO: 69505 - protein, 612 aa, Zea Mays
MGRGRWASGIRAAALVLLAVAAAAGAAAGDPDPDELERAFPIVEPDHGHTKLRLSEQGLEAIRRIETPIAVVGVIGPYRSGKSFLLNQLLSLSCDKGFGVGHMRDTKTKGIWIWGTPVEMDVDGSKVSVIYLDTEGFESVGKSNVYDDRIFALATVLSSVLIYNLPETVREADISRLSFAIEIAEEFYGRVKGQDVAFEPAKLLWLIQRDFLQGKSVQQMVNEALQRVPNDNGDKYIDEVNQIRDSLAVMGNNSTAFSLPQPHLQRTKLCDMEDKELEPLYVKRREQLKQLVSSIVKPKIVQGRTLNGKDFVSFLQQILEALNKGEIPSTGSLVEIFNKAILDRCLKAYREKMDGLGLPVPVDKLQKLHEMANGDARILFDKQHFGKHHAAQSALKLEDDIKKVYRNLLLANEYQSSKLCEARFSECEDKMDHLQVLKLPSMAKFNAGFTHCNQSFVKECVGPAKESYERRMSKMLAKSRALFIKEYNNKLFNWLVTFSLVMVVIGRFVIKFFLLEIAAWVMFIFLETYTRMFWSAESLYYNPAWHIIVSSWETIVYSPILDLDRWAVPIVIMLLFGVLYWRCFGGRRKRGRGSLLPLYKNSYNSSRRSRSD

SEQ ID NO: 69506 - protein, 337 aa, Zea Mays
MLGITPLAERLGYATEQLAIYTGPTVGGLLNATFGNATEMIIAVYALKNGMIRVVQQSLLGSILSNMLLVMGCAFFAGGVVHRNKDQIFSKATAVVNSGLLLMAVMGLMFPAVLHFTHSEVRQGASEVALSRFSSCIMLVAYASYLYFQLSGRSNIYSPIGSEEAPIEDIAEEDEEAEIGMWEAVTWLAVLTLWVSFLSEYLVNAIEGASDSLNLPVAFISVILLPIVGNAAEHASAIMFAMKDKLDITLGVAIGSSTQISMFVIPFCVVIGWMMGQRMDLNFQLFETATLFITVLVVAFMLQDGTANYLKGLMLILCYLIVAASFFVHVDPQSSDG

SEQ ID NO: 69507 - protein, 397 aa, Zea Mays
MSRMGGKDCVPPVAMVLVQLGFAVMNIVSKLALDAGMSPYVLIAYRNLIAAAVISPIAYLLERRSGATITKKVLLQIFCSSIFGATLNQVLFVVGLKSTSATVACALTNTLPALTFVMAAALKMEPVRPGTAAGQAKLVGTAVCVGGSMLIPFYKGPVLRVWASPIHWRFAEHASPPAAAAAAGAHTGPAAVLGDVLVIASCVAWAVWFILHTKISQGFSAPYTSTAIMCLMAGVQCAGVSAALDRSLAVWKLGFDIRLYSVLYIGIVGSGAGFTLMSWCIQVRGPLYVSMFSPLLLVIVAVVGWAILGDKIRLGSAIGSVLIVAGLYMVLWGKGREMDRPGLDNDKGDEETAAALGLAVASSKGGAVVVSSRVDAVSSLPVFSTTTSPKRQQLIHG

SEQ ID NO: 69508 - protein, 77 aa, Zea Mays
MEMDYYIVICYEDFVTFELQSKNELLHFQIVSCLGFSKYITSTVYLDIMYMETRGKKRYVSVHKSMLFWTKSPIWIT

SEQ ID NO: 69509 - protein, 507 aa, Zea Mays
MARAALRLGDRALALLVLVSVALLPLVSSDDGHKHCEGVVRGWADSSTGRVKDGDKLSLKDLLFFLHIPRTGGRTYFHCFLKKLYTNAQECPRSYDKLRFDPSHPDCKLVVSHDDYSLTSKLPRERTSVVTILRNPVDRVFSTYEFSVEVAARFLVHPNLTSAKLMTTRVLKKSRAVSTLDIWPWKYLVPWMREDLFSRRDARGIDKVHSSKKVNAYDVEDMVMPLHQYINDPVAHEIIHNGATFQITGLTNNSYFDGAHEVRHCARKHPDLGRIVLEVAKNRLDQMLYVGLTEDHEESARLFAHMVGAQVLLQSGTLSLDLKEDLHSETGFDLFGDGVCALPDQNEYSHPSMVEPGDEEASEHLMTVGKLMEAYETCIAKLRKSQSSRRKISLKKVEEANFSKEARKLVPEAILKQIISLNSLDMELYDHAKKIFTQEHLMLKAQQSMAGQHRQLAEQEEGWIGTMCSDGTCSPWVVVLLGLGITTILVLATLAVTTRKRTSKLKV

SEQ ID NO: 69510 - protein, 56 aa, Zea Mays
MLRPTLSLTSARFDPVRGFSSSSSLTPPPLPLRVERYRVRVLCLLDLSSASFCTGG

SEQ ID NO: 69511 - protein, 61 aa, Zea Mays
MDMKSLEEEYKALQGDKSGEVEYFQSLDETINGMKGILDPVKCQCGLEYNLKLDGEAMDIS

SEQ ID NO: 69512 - protein, 497 aa, Zea Mays
MCYLSVPILKEMNLVDTPGTNVILQRQQRLTEEYVPRADLVLFVLSSDRPLTESEVGFLQYVQQWKKKVVFILNKLDLYRNSNELEEATAFVKENAMKLLTAEDVTLFPVSSRSALEAKLSYSKNSDGKHSTEAMYNDPRWRSSKFFELEDYLLSFLDSSTENGKERVRLKLETPIGIADRLLTSCQRLVKLEYEKAVEDLASIKDLVYGANNYAIKLKSDSSSWQNQISSLIERAKGRAVTLMESTLQLSNIDLIFAYTIKGKTGSSMRATSFVQNDILSPTLDDAVNLLGDYSTWLSSSNTREANVYLECFCERWDALVAPEERALLDPNGLVNEGEKLTIKALEGFNASAAAKDFEEEIRELAFGTFGGLGIAGLSASLLTSVLSTTLEDLLALALCSAGGFFVLSSFPGRRKHAIDKINKAADELSRKVDEAIQKDISQSANNLIRFVEVISKPYQEACQRKIDWLQGVQGELSAVERKLQTLKVEIQNLNGS

SEQ ID NO: 69513 - protein, 56 aa, Zea Mays
MHPRERHVVLAPIEYTHAWRGSQGTSSWWRRCSGCIVSLVNDDCGSVGYFTNQRGL

SEQ ID NO: 69514 - protein, 89 aa, Zea Mays
MLQMRLPTGTVHQNIVYKHHNKFAKIWGQHHIHCTLKCSRGVSKPKRHYPKLIMTLVCFKHCLEFLGFPHANLMIPRRHIQTREKFGTC

SEQ ID NO: 69515 - protein, 63 aa, Zea Mays
MCVCFNGSEEIDCDYLHYLSCTGARTPGSVAPVTGAAHRSAIWEISRNLWKAVARKEIRRMES

SEQ ID NO: 69516 - protein, 943 aa, Zea Mays
MKLSSFFSEKQNEICHKGEQNNQNKDIEFQPSSAQEGSQYQSGDCESEASMDTLELSKDSLSSDEQKASAFEERESGDFTVDEGEYDYETACSESRNDTDGNLGVPQSPNAKSRCSNLFSTRSTGSHLSLSLEKSAAKPSGRPHSTLTDPNFVENYFKYSRLHFIGTWRNRYRKRFSNLLEAKGIKLSADHSGKKKTIIHIDMDCFFVSVVIRNMPELHDKPVAVCHSDNPKGTAEISSANYPARNYGIKAGMFVRDAKARCPHLMIVPYNFDAYEEVADQFYGTLHKHCSKVQALSCDEAFLDMTECLHDNPEEVTQRIRSEIFHATKCTASAGIAENMLLARLATRSAKPNGQCFIPSEKADDYLSSLSIKALPGIGHTVSSKLKSKEIEYCSQLRNVSKDALHKDFGKKTGDLLWNYCRGIDHSIVGSVQETKSVGAEINWGVRFNDNKDAEHFLNNLCKEVSLRLQGCGVQGRTITLKVKTRREGAGEPIKYMGCGDCETTSRSMTIAGATDSFVTLQRIAKQLFSALHLDVKEVRGIGLSLSKLEHADLGRGASQGHMLESWLASPAAKLKKQQSEILGNVNVAGTSGLKDLRSGPSHTAEANLRNDRSTVFHNVELPPLSQLDLEVLKNLPPEIMSEMNEMYKGELQSLVDTLNSDKGKENSSKSLALPAVIRKSVPADAKLQGYRDHRDSMHLEEEHTKGKSDKQLSEAKPANNASCSRVSASIEKTTKSVTQLDLMPDSLSQADLTVLQELPEDVKADLFSALPLHRSGDPACSTSNVSESKSPNVVRAENRSSNDGGTDDLKTPRSFLPPGSSQKWIEQFRVSSCLILNVIAEQHTDSSCQRPLSSVLEPVASFLPLCPNPGSEEWNETHSCLSELLRHYIQLKVEYDIEELYKCFCLLKRFSSASEFFLDLHDSILPFLQDSISQHYGGTLQF

SEQ ID NO: 69517 - protein, 215 aa, Zea Mays
MDMSDVFLNNCANFPFIIFVVGGQEPGGVRAGAVHAGHAAGPLPGLLDGAMAESGDGRSAATRWTWRSSGRGAPCGMRWTCSSSMSLATARCCPYIFTDIFNNDLSGPYAFLEPPFVQRSLLYKIQKPNTLESQSPTSPTGVTSSPCSTPCRRRAGAAAATAAVLGRRMPPRSPTPSTRFARPASLRCVYSLLHSCATCSFSNVFQNTTACLCPQ

SEQ ID NO: 69518 - protein, 1447 aa, Zea Mays
MGRKKRTSAPNPTPPPLDASRRSPAAAEKPAGIGREDAAVRAEVDKALACLQRGSHARAQRLTRDAIARHGEASPLLLRAHGTVHARAASVLDDHASRARHQRTALQAAQRAVQLAPDSIELAHFHAMLLFDAATDSRAYDEVVAECERGLSIEAPSDPAPHSLRLPGPDVDQVQSELRNLIQKANLASISSWVKNMGGAGDDKLRLIPVRRLADEPMEARLVPTAPSPRRPNEIKKATKTTEERRQEIEVRLAAMRLLQQQKEQSNDVVSATPASSRSHGDDAPSSSESSVGGHRADRRKGGSRKATGSSASERTDQVRAYWGSIPVEQRLAFLNTSISELKSHYASAMHKEKDAASAASDVLNEVIQFANKHDKWEFMVCGRCREQFTHVEAHRWHVMVEHVGLLSSELQEMVPQEIDADWAEMLSGCNWRPLDATAALKLFEEDQHNNLGPDREDESNSLDSWSNKAMDMSESSAWSHNEESSGFGVVVREGDTKWPFSDDDERAKILERIHSSFKILVKNHNLSVHNLNRVIRFAVEELRGLPSGSLLLNHSLDESPLCIRFLEASSLQKVDNFLQDLMQASGLNRNLQKAEGLGDGDSFIQNHDVLEKVTLNSDSSELIIDGHTFGGKFDSESVDTDALLSWLYAGSSIGEQLLAWNRMIDERSNQCVDLIRALGREFNNLQNSCERKLEQLRNEDAFTSVEGLFCEEQTRREQVGRYGFQTFEELLRKRQEFLEHNTEEQSDSNRSEIDAISAILKELHTSHFGYDEALTGMAPRFSDFDGGEEDEWRLHDFIHPNDSMVHMVVSKMKEHVTMEISKIDAKIMRTLSVMRQLEHKLGPVSALDYRMILLPLMRSFLQSHLEELVDKDARERSDAAREAFLAELALDAKKNASKGGDMKQSHEKSKDKKKFKDSRRAKEFKDSSWSDQSLIHQDSADEETTETFQILADCDDLDCKFSTSDDYFNEQEEELRHKVQLEAEERKLEETLEYQRRIEEEAKQKHLAEQCRSTYASSVIGTARLSSTGNQDNHESAINHSSRTYLEGIKFGDFRYTENNFSQKLNGLDSSDAHALTSSDMNAPRWTSTCKIAPYANHSYQTGKQNRLHVLPSDDLQFAHRDHAAGTEKPNFEKVGSGAIPSADLCIKDDFDKRFQEDLDEAVRQSLGYDAYPAGTISTSNETEVYGTGLKNAAGEYNCFLNVIIQSLWHIRRFRDEFLKTSSLHKHVEDPCAVCALYGIFIDLSKAAKGHGEAVAPTSLRIALSKSYPNSKFFQEGQMNDASEVLGVIFECLHKSYTSRTVCHGKPHEKNSIGSWDCANISCIAHSLFGMDVYERMNCHNCKMESRRLKYTSFFHNINASSLRTAKMMCPDSSFDELLKVVIMNDQLACDQDVGGCGKPNHIHHILSTPPHVFTVGKPFLALGYFRLQLFCMYFHVQSCCCLMNI

SEQ ID NO: 69519 - protein, 88 aa, Zea Mays
MSAPANEKAYRRAMKRACLAAVAVLREVRSLSVYHFMARYLPPCHGLVWRGAWILAADRNCRVRRVQLGSGDWGTLSICVSETWCIIN

SEQ ID NO: 69520 - protein, 310 aa, Zea Mays
MGSSSNTNTSGGASDKEEKKKEDKIKGKDSSGPSFKENERVLAYHGPLLYEAKVQRIENHEDEWRYFVHYLGWNKNWDEWVANDRLLELTEENVRKQQELDKNQVVDKTMKSGRSTQHKPKVSNADAKADKDDTKSLMKGKKRKSQLGTEFPLPLKKQLVDDWEFVTQMGKLVKLPRSPTVDDILKKYLEHRAKKDGKINDSYAEILKGLRCYFDKALPAMLLYKKERDQYAEEVKGDVSPSTVYGAEHLLRLFVKLPELLASVNMEEDALNKLQLKLLDVLKFLQKNQITFFTSAYDGSCKGADEDKTK

SEQ ID NO: 69521 - protein, 69 aa, Zea Mays
MTHVVVLLFGQPRSRCHRTLPSVDVGPRASRARQKSQTCGQHTRDPSLILPGTIIDHVMWRTKDGLISR

SEQ ID NO: 69522 - protein, 237 aa, Zea Mays
MIDNGLLAKRVHIMTFERILSFIMAEIQFSFVKVKDEVVSKNEEDDVGPGSDLHITNDQVYCETEKVKEGGGNTLNDLARRTTDLDPLDKKEASSSKGHLAMPLNPSELQGVIWPPHINERPNSVFKEKLIEFLIKPFTQEEYDRYFALASDRIPMVKERRTRNTVAYYHWTHEMSKSYFDRYPDLAQQFSLQRNNYTNGLALLRGLFFWLQNIELEDQFRPWSDEFKKYRVVMECL

SEQ ID NO: 69523 - protein, 364 aa, Zea Mays
MPRREAARLLRRLGPIAVQSPKRGFSGMPHNQYESTNHAVNSYRRFHWIPSVQHPLCGPTSSGGIYEGQRSANKACEVQKRTFGSAATQFQRNPAYSVLNSDDIAYFKSILGENGVVQDEDRVAVANVDWMGKYRGASQLVLLPKTTTEVSKILSYCNTKRLAVVPQGGNTGLVGGSVPVFDEVIVGLAGMNKIISFDNVNGILTCEAGCVLENLSTFVENEGFIMPLDLGAKGSCHIGGNISTNAGGLRFIRYGSLHGNVLGLEVVLADGTILDMLTTLRKDNTGYDLKHLFIGSEGSLGVVTKISVLTPAKLSSTNVAFLSCNDYTSCQKLLLAARRSLGYATFGRSSKSFTCITVQILRSS

SEQ ID NO: 69524 - protein, 196 aa, Zea Mays
MMSSQTKDEVTHAAVERLSENGLLDPDAIVRTDETTLANLIKPVGFYQRKAQFIKEASKICLERFGGDIPDSLNELLALRGVGPKMAHLVMSIAWKNTQGICVDTHVHRISNRLGWVFREGTRQKTTTPEQTRISLEKWLPKDEWEPINPLLVGFGQTICTPLRPKCDKCGINNICPSAFKESSSPIPKQKKTRSP

SEQ ID NO: 69525 - protein, 486 aa, Zea Mays
MPDIVVATPGRIIDHLRNSLSVGLEDLAVVILDEADRLLELGFSAEIQELIRMCPKRRQTMLFSATMTEEIDELVKLSLNKPVRLEADPSLKRPATLTEEVVRIRRARESNQEAVLLALCLKTFKRSVIIFSGTKQSAHRLKIIFGLSGMKAAELHGNLTQAQRLEALELFKKKEVDFLIATDVAARGIDIVGVQTVINFACPRDVKTYLHRVGRTARAGREGYAVTFVTDDDRCLLKAIAKKAGSQLKSRIVAEKPVAECARLIEQLEGQISIIIREERVEREARKAEMEIAKAENMIAHKDEIYSRPKRTWFATEREKKLLAAAAKESLDHGKSTSGVISAKKAEDLRLKEKRRREHEKNLPRKKRRRLEAQREMLEDEDDEKTKENDRGKQPMKGQSLVDAAYRKAKSLKAASKRAPGARKGKKEKNERQHSEKAPNRHEEMRDLFQNDMSEWKQGRSSKKNNKFAPKKSRNSFKSKARYKRK

SEQ ID NO: 69526 - protein, 117 aa, Zea Mays
MPAYFRFLALLAFKIFSAEQVDVAVLEVGLGGKFDATNVVKAPVVCGISSLGYDHMEILGDQILFLVINLVSINGLLVLMNVMLSRNKELLSAPNRLKWKCLTHCLIRGEAEGGLIR

SEQ ID NO: 69527 - protein, 180 aa, Zea Mays
MACRALALRSLLLPDPLHRLPAAAPPVWRASRGGRRPHLRCCSGGGGGEPGQPPQEAVLEAISTRSKGRVALTTNMVMGGTVTDDASDEWLVLDQKVNSYPTDRGFTAIGTGGDDFVQSMVVAVESVLQESIPKGRVSQKLSSRGKYVSVNIGPIRVVSSEQVQAVYRAMRRDNRMKYFL

SEQ ID NO: 69528 - protein, 562 aa, Zea Mays
MAYLSSLHHAPYPRLLLHHRYLFFSASSPPPVVTTRRLVPTLACHGRDLLDVMPYRDSRPSGTEGSRAGPGGAPRVTNSSTVRGNATAQEAHMPMWRERTPGTPRTWKKGDRVMLQEHAEGESQEKSWRRGLTRSLESKGPMVRKSWTRDGNGMRAKESGKVGNSRDEGTGRRNACKKMKKPPDGEYAGKLRVELDMCSKRGDVMGAITLYDSAVEEGIKLGQHHYNVLLYLCSSASLGFVQPAKSGNMGSGIASIGPAQKLDPSPSRSLGGSEGDNAYASESHVQDQGKNKADLIPGGLKAQTVSIPVEDELGDYARARGFEIFDKMCSEKERVQMSEAALTAKARMALSMGDSDMAFEIVKQMKGLGLKPKLRSYGPALTAFCNSGNVEKAFEVEAHMLESGITPEEAELETLLRASVVGRRGDKKWLEKHGPFEAVVDAANVGLFSHKHLSLSKVNSVADAIRLRFTSKKWPLIVLHNKHLIGERMKKLNDHKLVQKWKQENSIYATPTGSNDDWYWLYAAIRCKCLIITNDEMRDHTFQILERNFFPKWKERHQYCFH

SEQ ID NO: 69529 - protein, 300 aa, Zea Mays
MNKTYGGGGWCNTTQSCSERKMTNFGSSKYMGAVNFTGILSNDHTENPDFYNWNTVVIRYCDGASFAGDAEGGDLDGTKLFFRGLRIWKAVVDELMGKGMDAAKQALLTGCSAGSLAALLHCDNFHGRFPHEVSVKCLSDAGFFIDEKDLSGERSMRSLISGVVHLQCFFPAELIKGITTPTFILNSDYDSWQEWSSCKADIRNCSCAQLDVLHGFKKKLVSELKVAEDNKDWGLFIDSCFTHCQTPFDITWNSPISPRLGNKSISEAVGDWYFDRRQNAKQIDCEYPCNPTCSSLLPTA

SEQ ID NO: 69530 - protein, 396 aa, Zea Mays
MAAAQEEAAAAPPSTESDATETEEAPPGGAESDATAMEAAAEYSWLQLRFDRPPRRLYHFARQFRSATSSGSNSSGENFLKGVKWSPDGSSFLTSSDDNSLRLFYLPEEAYIAAEPVAEAAVESEDSYGAFIQANEGEPVYDFCWYPCMSLSDPATCVFASTSRDHPIHLWDATSGELRCTYRAYDAMDEITAALSISFNSSGSKLFAGYNKAIRVFDVHRPGRDFDQYSLLKGGEGPTENNMEPLYVLHGQLGGVTQVLFSKDGNYLYTGGRKDPYILCWDIRNTVDIVYKLYRSADTTNQRIHFDIEPCGRHLATGGQDGMVHVYDLQGGQWVTGYQAAADTVNGFSFHPYLPFAVTSSGHRRFGMQDEFEDELNLAGDENSCSVWMFSSSQEA

SEQ ID NO: 69531 - protein, 309 aa, Zea Mays
MFFALNLVVNQTHLSCSVQTHPDFRVPTPTALLALHSANSFRGDPEQETQQRGGSRRAAAATMMSGSSPPPPSLPAGSGGFFRGYTKLCKGLAVILLIVHLVVQLFPSAVTYLALIPGRTIPFAWNLITAGYVEQTIPGMVVSIIGLLLFGKLLEPLWGSKELSKFIFIVNLSTSACVFMTAIVLYYITQQEIYLYTPFSGFYGVLSGLLVGIKQLLPDQELNLFVLKIKAKWIPSLVALISILGSIFIYDFMSYLPVLLFGMYMSWIYLRYFQKRLETSLKGDPSEEFSFSSFFPEFTISRPNSICIP

SEQ ID NO: 69532 - protein, 237 aa, Zea Mays
MPSLLTSPSSAVLGRRARRPSSLRRPPSFPWQELRSAPADLGTRRGSKQRLLPQDRLTVSRELLSLTSPTDKQVRPSPNPLSSARMDSSLLTPACAVSPVSSSHSNSALRRLAVLSSPVDSSNPDVFTSCAPPRFAQPLRDVVHPLDVDAVPRAPSVRRNAQPTDSTRVSNPIRLGTLDVEHVDVKDVALELLLKKATMSEEKHHHLFHHHKKDEEQPTGRRVLRDRGHRGGDHRRR

SEQ ID NO: 69533 - protein, 91 aa, Zea Mays
MIGINAAIFTQTGTSAGVGFAIPSSTVLKIAPQLIQFGKVRRAGLNVDFAPDPIAYQLNVRNGALILKVNCMYQMFACTSISLSYRTLAPP

SEQ ID NO: 69534 - protein, 254 aa, Zea Mays
MLPRRFSNHPGSSSPLPFLVVCGLLLAAAVAFSPVAAAEAAGRGGGGGGGGAGHEGRAGKPEVEAEAEARGDGVAVAEAGGEVVAQGNATEAKEGSLADMIDRALEKEFPESESEQGGGETDPGSFNNTVAEKQGVLETVARRVTKKNETKDNKSFPFKEVFLDRSEQEDVPTLIDRKDNVFIISNPKSKYPVLQLDLRLISDLVVVIVSATCGGIAFACLGQPVITGYLLAGSIIGPGGFSFVNEMVQVRLKR

SEQ ID NO: 69535 - protein, 1400 aa, Zea Mays
MEPAVATAGEGQRFKRISRQAWSGNLELDPLLNESLDQWPHLNDLVQCYKADFVKDDCKYGRYESVAPPSFQNQIFEGPDTDIETELQLCNARHFKPEDPTEDDMPSTSGRQMYETESSASSSKVHCSLSPLPAYEPAFDWENERSLIFGQRVPESIPAISNSGLKITVKVLSLSFQAGLVEPFSGTICLYNRDRREKLSEDFYFHILPTDMQDAQGSLDRRGVFSLDTPSPSVCLLIQLEKAATEEGGVTPSVYSRKEPVHLAEKEKQKLQVWSRIMPCKESFAWAMIPLFEGNHAGGLSDAASPSSPLATSLPGSTSQDSIVDPILKLTLDGKVNHYSSGSSVIVEISNLNKVKESYIVDSLQDPKRKVHKPVKGVLRLEVEKLHGGHNDVDNTSEGGSMANDLNDAGDINNGRSNRSSFDGIHSFVNSIAIAQKDAHHNGIISNAENGDNFEAFDFRMLTRSEPFSQLFHCLYVYPLTVSLSRKRNLFVRVELRKDDSDIRKPPLEAVHPRERNMMLQKWGHTQIAVGTRMASYHDEVKISLPALLTPQHHLVFTFFHVDLQMKLEAPKPVIVGHSVLPLSTHIQLLSDVSLPILRELVPHYLQGSGKERMDYLEDGKTVFKLRLRLCSSLFPVNERIRDFFVEYDRHTLHTSPPWGSELLEAINSLKNVESTALLQFLQPILNMLLHLIGDGGETLQVAAFRAMVNILTRVQQESSDGAERNRFLINYVDFAFDDFGGRQAPVYPGLSTVWGSLARSKAKGYRVGPVYDDVLAMAWFFLELIVKSMGLEQSRLFYHNLPLGEDVPPLQLKEGVFRCIMQLFDCLLTEVHERCKKGLSLAKRLNSTLAFFCYDLLSIIEPRQVFELVSLYMDKFAGVCQAVLHDCKLTFLQIICDHDLFVEMPGRDPSDRNYLSSVLIQEIFLTLDHDDLSQRAKAARILVVLICKHEFDARYQKSEDKLYIAQLYFSLIGQILDEMPVFYNLNAIEKREVLVVILQIVRNLDDATLIKAWQQSIARTRLFFKLLEECITHFEHNKTGGSMLLGASSRSPDVERPAPPKYSERLSPSVNAYLSEASRHEIRPQGTPENGYMWNRVSPQLSSPNQPYSLREALAQAQSSRIGSTARALRESLHPVLRQKLELWEENLSTAVSLEVLRITEKFSAAAGTRSITTDYAKLDCVTSIVMGLLSRSQPLAFWKAFLPVVYNIFNLHGATLMARENDRFLKQIAFHLLRLAVFRNDSIRKRAVVGLQILVRNAFNYFKNTTRLRVMLTITLSELLSDVQVTQMKSDGSLEESGEARRLRKSLEEMADVRSKDLLKDCGLPVTALEAAPDGSSDNMWSWAEVKHLSKCLVQALDAGLEHALLDSVVTVDSICVMHTRRCNHGLKQHNVQLLQLA

SEQ ID NO: 69536 - protein, 1279 aa, Zea Mays
MELVEDERLESMELAAQNKGLPSMLYLDSDTLQQLDSFRGMLSQFPPTTVRMKLPFSIKPWTGSEDNVGNLLMYSYNFISGDILLTGLQVWKFLITFTDVLGLCPVTLDEFVQSLHDYDSRLLGELHIALLRSIIKDIEDVARTPSIALGVNPGGGHPQIVEGAYAWGFNIRSWQRHLNLLTWPEILRQFALSAGFGPQLKKRTVEDSYYRNDNEGHDGENVILTIRNGTAAVNAAAKMKERGYTNRRRSRHRLTPGTVKFAAFHVLSLEGSNGLTILEVAEKIQKSGLRDLTTSKTPEASIAAALSRDTKLFERTAPSTYCVKSPYRKDPADSEAVLSAARERIRAFQNVLSDSEAEKEVDEAERDDDSDCDDGDDDPDGDDVNTEVEDDKDPLLAVKSQDEVPSTTTVIGIKANLDGVGNALNSSSSFTKSAKGAPLPSLGRSNAADTSNDLPLGVSSANHEVVPDDSENTQIDESNQAEPWVRALAEGDYCDLSVEERLNALVALVGVATEGNSIRAVLEERLELANALKKQMWAEAQLDKRRFKEEFTSRVQYNSDMGLKPDIYQENNVTEITSTPACDAYRENDEHVGTINNCEMLDQHNQGNAGSLPYERNGVCQEILATPDTSYVQQYAYADKRRSQLKSYIGHRAEQLYVYRSLPLGQDRRRNRYWQFTTSASPNDPGSGRIFFESKDGYWRVIDSEEAFDSLLAALDTRGTREAQLHSMLQVIEPTFKEAIKRNVSIELSAGRYPKNGATDMIRANYHSEVGSSSSTPSATSDSITAYSDSFKVELGRNDFEKTAISKRADIFLKWMWREFYNQELTCAMKYGKKRCSELLHSCNCCYQIYLAEERHCSSCHKTFKSIYNFSDHTTQCEEKQRTEPFWNMQNTDYSVPIGMAYIPSEALQPFWTDVYRKSWSVKLYTTKSIAEIFQLLTVLEGAIRPDCLSSDFETSECLNSQVGSASVLPWVPDTTSAVMLRMLDLDSAILYVQNQKMDRDDGGFMKFPSRYTVAKSKQETTPETAGLDLYDGRWLPGSGRRGRGRGSRGGSRGGRGRSRGGRIPRGVSSSSRIEFKGGIVASDKAPRKNVRRGRGRGRGRRRGRRTVRPRQPSVGRARSIPKENLLGSFSMLSSSKAATIEESPRSSGADEWGLETRTTYTECDENSSGSQSEDNEENGQPMDDDYEDQVPDYSIGYSTGSRHHVMMSMMDHDSDEEDEDAEGDENVEEDADLAVDDADVEMDEDDEIGDDGEDGGVGGEMNADEDPDATSYSSDYSD

SEQ ID NO: 69537 - protein, 66 aa, Zea Mays
MATYNKCLDEFDLMGIPPAPRGLPQIEVTFDIDANGIVTVSAKDKATRKDQKITIRSSGGLCEADI

SEQ ID NO: 69538 - protein, 155 aa, Zea Mays
MPFTIAQSLPFPTRLGRHCAITARPHAPRPPSVQSSPSPSFPTRRGRHPRHHLPSPRARRGRHPRHNLHSPRARRGHHHLPSPRTEAAIRAIAFLPYVRPPSVCAPPLSFAHPMPCHLRRDSLTHLGYPWDGAVRPRPQRSMEGAIHSAELLVLA

SEQ ID NO: 69539 - protein, 177 aa, Zea Mays
MTMQDVCDLMLHAKIRVKHDFGSSAITQRNLADYVVHVALQKGTTDNVAAVVVPLGSPGSTGTTLKDSSQFEEDLKISISPMLNVPYGLKPDHGHSSAVIDMEYFKRSSIKFQRFLVEAKPKKLGCFYLSESLDEDMDYIFRVPEAYQREEVHDFNHIPAETALYSDGGHPTPLGTF

SEQ ID NO: 69540 - protein, 70 aa, Zea Mays
MQACLVIIRSCCRAWIRTRRRDPDECHVTKLQAAVSSFLACRASLRVHACEHVTKYMYCQYMPPYHDGIR

SEQ ID NO: 69541 - protein, 86 aa, Zea Mays
MTVRSFPKVVKWSLTRERERARSKAYTRARVKCTQPSTGGSSCGSWTNCKTATDAMCRSPSRERKLEKRTPENAWSRGRSEERNLL

SEQ ID NO: 69542 - protein, 57 aa, Zea Mays
MEEFGDSLGTCSDLGRQNCSSTVESPCNVSEAAYSTDSDYILWRSIEKSTVFICHHD

SEQ ID NO: 69543 - protein, 157 aa, Zea Mays
MVPASNSSDRSDRSDKPMDQKVLRRLAQNREAARKSRLRKKAYVQQLESSKLKLASLEQELQKARQQGIFISSSGDQTHTMSGNGAMTFDLEYSRWQEEQNKQINELRTAVNAHASDSDLRLIVDGIMAHYDEIFRLKGIAAKADVFHILSAIFSAG

SEQ ID NO: 69544 - protein, 287 aa, Zea Mays
MYFEGYGFRGSTFEQTYRCYPASFIDKPQLEAGDKIHNAAAERTSHCGVLEFIAEEGMIYMPYWMMQNLLLQEGDMVFIKNANLPKGTYVKLQPHTTDFLDISNPKAILEKTLRNFSCLTTGDSIMVAYNNKKYYIDIVETKPSNAISIIETDCEVDFAPPLDYKEPEPVKPAVPASTEPGTDVPAEEEPKFIPFTGSGRRLDGKPSKDKDVLASSPAKRQANATNGVQPSTATTSQGSSSRKATGKLVFGSGGNRAEKAPEKEAEEPKKEDPKFAAFTGKKYSLKG

SEQ ID NO: 69545 - protein, 141 aa, Zea Mays
MASIACMPHACTGTFGLGSGREESWEKGARLGSCQAGPPVLRINGSGRGSRFCLLSGALLFGCRGRRARAPLGTGSGPVDTFRNPCPCSTCTLPACPVGGRAGWLTVTGMMAPVQAGSGTALTTDLIKHTRTRRHTLKHRP

SEQ ID NO: 69546 - protein, 872 aa, Zea Mays
MWATLHKPVAHANLRLLLTVSAFSGPLHLGTASAVAAAVTTRRSSSSRGVAATAMPSSSPPPLPPAEETTASAAALAPEGGFSLTEPSFLESLMPKKEIGVDRFLAAHPEYDGRSALIAIFDSGVDPAAAGLQTTSDGKPKILDVLDCTGSGDVDTSKVVKADADGAIVGASGARLVINPSWKNPSQEWHVGCKLIYELFTDTLTSRLKKERKKKWDEENQESISDALKQLNEFEKKHPKPDDTMLKKAHEDMQSRLDYLRKQAEGYDDKGPVIDIVTWNDGDVWRVAVDTQTLEGNNDGGKLADFVPLTNYRLERKYAIFSKLDACSFVANVYNDGNLVSIVTDCSPHATHVAGIAAAFHPDEPLLNGVAPGAQLISCKIGDTRLGSMETGTGLVRALIAAVEHKCDLINMSYGEPTLLPDYGRFIDLSNEVVDKHRIIFISSAGNNGPALNTVGAPGGTSTSIIGVGAYVSPAMAAGAHCVVQPPAKGMEYTWSSRGPTADGDLGVSISAPGGAVAPVPTWTLQSRMLMNGTSMSSPSACGGVALLVSGMKAEGIPLSPYSVRKAIENTAASISNAPEEKLTTGNGLLQVDRAFEYAQQAKKLPLVSYRISINQVGKSVPKLRGIYLRGGNACCQTSEWTVQLDPKFHEGASNLEQLVPFEECLQLHSTDTSVVQIPEYILVTNNGRSFNIVVNPANISSGLHYFEVYGIDYKAPWRGPIFRVPITVIKPIALLGEPPLLSISNLRFQSGHIERRFINVPFGASWAEVTMRTSAFDTPRRFFLDTVQICPLKRPVKWEAVVTFSSPSSKNFSFPVEGGLTLELSIAQFWSSGIASHEPTCVDFEIVLHGISIDQKVSTLDDQDTLSTRGV

SEQ ID NO: 69547 - protein, 352 aa, Zea Mays
MGRKASHVALECALQSHPNMVILGEEVAASKLTIFDITKQICDAVQARAEKDKNHGVVLIPEGLVESIPELYALLQEIHGLHGKGVSVENISSQLSPWASALFEFLPPFIRKQLLLHPESDDSAQLSQIETEKLLAQLVETEMNRRLKEGTYKGKKFNAICHFFGYQARGALPSKFDCDYAYVLGHVCYHIIAAGLNGYMATVTNVKSPVNKWRCGAAPISSMMTVQRWSRGPSATQIGKPAVHMASVDLKGKAYDVLRQNSSRFLLEDVYRNPGPLQFEGPGADSKPISLCVEDQDYMGRIKKLQEYLEKVKSIVKPGCSQDVLKAALSAMSSVTETLNIMTSSSTGQTAL

SEQ ID NO: 69548 - protein, 718 aa, Zea Mays
MAAEELLRKLRELEEGQAELKREISKLVPEQQQQHHHHHYHSSRRPPQPSPVRRALPAAPSLPSRLQRVGRVGLTDRQHIRALHALGQAVHIIAPGGKLIYWNRYAEQMYGYSTSEAVGHDAVELLVHPDDAEAANNIIGNIFMGKCWRGKFPVKKKSGERFFIVANNTPLYDDDGSLVGLICLSVDTKTLEDIIGPSTSMKSHTHPVKPRFQVNNRPKCNLLNKSSIESEQTVQSSIASKITTLATKVTNRVRSRMKTGQNCGGSECPYSEDDSKEELTSSGNTPRGDVLHGGIVKGDNFPGKSSKTSSEDSGDGNERLCKISSKTEDLLAKKGISWPWKGHEHSGPDKGHMNPLQFHDKQDNDQIHLVGPESIIIPDYQDSDSTQESRYEVTGNWWSFNNDSFNSLGSSLSSNSSAIERVDLEADCLDYEILWEDLVLGEQVGQGSCGTVYHAQWYGSDVAVKLFSKQEYSDEMIDTFRQEVSLMKKLRHPNIILFMGAVASPERLCIVTEFLPRGSLFRLLQKNTAKLDPRRRVHMAIDIARGMNYLHHCSPPIVHRDLKSSNLLVDKNWTVKVADFGLSRLKLETFLRTKTGKGTPQWMAPEVLCNEPSDEKSDVYSYGVILWELVTQKIPWDNLNTMQVIGAVGFMDQRLDIPSDTDPKWASMIESCWDSDPQKRPSFLEVLDRLRDLQKQYSLQAQMQRNLSADALLKGAVK

SEQ ID NO: 69549 - protein, 334 aa, Zea Mays
MARYFRSSNLASRIFDRQLISPLPGATVNTIRQFYENLVPSYTIYDIDCPDYSFRKFTDDGKYLVAFSRNHQDLIVYRPIWFTYSCNEECETHELPPKAKKFDSFFKQLYSIPLASSNEYICKDFFLYMECHRFGLFATSTAQSNESTATEGAIHGVPLIEKITFHLVRLEDGVILDEKAFCNDFINLAHSIGAYMYEDLLCIVSLRYQTIHILQIRDSGNLVEVRNIGAFCREDDELFLHSHIQTGYGGSFLPGIKQRLLSYIFCKTWNEVPDQTLRVQHLKKKFYFHFQDYVDLIIWKVQFLDRHHLFVKFGSVDGGLTANTFWISLGFSEY

SEQ ID NO: 69550 - protein, 332 aa, Zea Mays
MTRHNISKSLAVVLRARMQPNPISSPPPPTPPPPPTDPDPAAPLVASVSHWLHVSASAASPPPAALDSFSDGYRSLDLVGRREVLRSLAVDYDVPRARVRDLMKQYMSVTSAEPSGVDDVEAEEGKEGAASALYRMERGLRDALRPRYAGFLEAMNAQPGGLKLLAVLRADLLALLGEENVSALRALDSYLKEKLVTWLSPAALTLHQITWDDPASLLEKIVAYEAVHPIRNLIDLKRRLGIGRRCFGYFHPAIPGEPLIFIEVALLKDMEASIQEVLWDDPPTPESEASCALFYSISSTQPGLSGINLGKFLLKRVIDMLRRDMPSVQRTS

SEQ ID NO: 69551 - protein, 131 aa, Zea Mays
MAAAGVEPRPNPPPTMASDLPNGSKTKSRESDRRRRRRKVKKNKSAAEAGAQNEGGGASSSDAKENADPNPEPMVEVEIEYVLEKAELDDPLLDDFKTIFEKFTFKGAAAAATEVFGLTKRFFNPSVDERA

SEQ ID NO: 69552 - protein, 81 aa, Zea Mays
MTFLPLASLLGSLQVLASARVIGLALLLHCSSRLGECQGKGPPKKGMARTGASQLLLVVLLLSAVMSSYSARVPRGRPDAL

SEQ ID NO: 69553 - protein, 397 aa, Zea Mays
MLFRIPVWCGVLITGLSTLMLLLLQQYGVRKLEFLIAFLVFLIATCFLVELGYSKPNAPEVVRGLFVPELKGNGATGLAISLLGAMVMPHNLFLHSALVLSRKVPRSVHGIKEACRFYTIESAFALTVAFLINISIISVSGSVCGSGNLNPEDQANCSDLDLNKASFLLKNVLGNWSSKLFAVALLASGQSSTITGTYAGQYVMQGFLDLRMKPWIRNLVTRSLAILPSLIVSIIGGSSAAGQLIIIASMILSFELPFALVPLLKFTSSKTKMGQHTNSIFTAVLTWMIGSFIVVINTYFLITSFVKLLVQSGLTTISQVFSGIFGFLGMLIYIVAILYLVFRRNRKSTQPLLESDAELAVSGSSADAGAECSLGHLPREDISSMQLPQQRSASDLD

SEQ ID NO: 69554 - protein, 68 aa, Zea Mays
MYVSCVIIYHCPMSIDITTSTRRFGTVPTRYVLVFPWLCSFYRRIPYITISVKDISASWPNSDALSSS

SEQ ID NO: 69555 - protein, 734 aa, Zea Mays
MITCSPQNLVIGLGVPSQGLSGTLSGRIANLTHLEQVLLQNNNITGRLPPELGALPRLQTLDLSNNRFSGRVPNTLGRITTLRYLRLNNNSLSGPFPASLAKIPQLSFLDLSFNNLTGPVPLFPTRTFNVVGNPMICGSNAGAGECAAALPPVTVPFPLESTPGGSSEHSSFLPLCLSFISTASQAGQLARLAASRAQCFSALSRSAWRGVHACVAAAAAFVPLPRRGSGRGDTVLSAWGRRRSRLRPGIPVVGCMPVCSAGGAVWPEPCICCCSRLGISVWLLCVCARAGTGTGAAAAGRSKAAGARLPIGVGTSLGASSLVLFAVSCFLWRRKRRHTGGRPSSVLGIIHERGGCDLEDGGGGGVVAAAARLGNVRQFGLRELQAATDGFSAKNILGKGGFGNVYRGRLADGTTVAVKRLKDPSASGEAQFRTEVEMISLAVHRHLLRLVGFCAASGERLLVYPYMPNGSVASRLRGKPALDWATRKRIAVGAARGLLYLHEQCDPKIIHRDVKAANVLLDEHHEAVVGDLGLAKLLDHGDSHVTTAVRGTVGHIAPEYLSTGQSSEKTDVFGFGILLLELVTGQRALQLGKASGALHSQKGVMLDWVRKVHQEKMLDLLVDQDLGPHYDRIEVAEMVQVALLCTQFQPSHRPKMSEVVRMLEGDGLAEKWEATNRPGVAAGAPCHDALGYDHRNDSNGSVFFNDFHDNDSSLSSDEARSIDMVEEMELSGPR

SEQ ID NO: 69556 - protein, 162 aa, Zea Mays
MTESISNTTATNEHLRHLAMDRRSTRDECMNAISNQLKDIESLEAESDAHGDKSLETALMWYDKFLGFQVVGGEGVKFVFNKIDVQNPDKKYSFCIKLAGERYILVWCVPSVDDAEELVKDLNCSNDLYKFVRAMREMFQAATISGILCYIFSLRVLSSIMT

SEQ ID NO: 69557 - protein, 286 aa, Zea Mays
MRAPWPCVGGSDSSMAWHEIRRSNTRAISHRKCNHTTEIDRSSGLLHSLFIVDPFMSCILAAGGELGTLSLRWRAGRSTTTFPCVAARNSDTSMRVRCPRRRALTPTRWYRPLPTGRCAGHGPSPIGAWAWAWPWRCRPASTPPCKGTTSLAHVRASAIQRIGGGARRGPAGHGVSSRCPRPSARRHYCVALPIQACSGGPGRYGRLQPRRPAPRGRRPADPTRWLQLGRSRTRVRTRYNKMYVQDLSGRLDLRQVVVGPGRKTVRQLPVRAPADMGLGGGGGGMI

SEQ ID NO: 69558 - protein, 1448 aa, Zea Mays
MDREIHRVTSLRRDSSLWRRGDDVFSRQSSRFQDDEEDDDEALRWAALERLPTYDRVRRGILALHEGGGGEKVEVDVGRLGARESRALVERLVRAADDDHERFLLKLRERMDRVGIDYPTIEVRYESLHVEAQVHVGDRGLPTLVNSVTNTVESIGNALHILPSRKRPMTVLHDVSGIVKPRRMTLLLGPPGSGKTTLLLALAGKLDKDLRVSGKVTYNGHGMNEFVPERTAAYISQHDLHIGEMTVRETLAFSARCQGVGTRYEMLTELARREKAANIKPDHDIDVYMKASAMGGQESSIVTDYTLKILGLEVCADTLVGNEMMRGISGGQRKRVTTGEMLVGPARALFMDEISTGLDSSTTYQIVNSLRQTIHILGGTAVISLLQPAPETYNLFDDIILLSDGHVVYQGPREHVLEFFEFMGFRCPARKGVADFLQEVTSRKDQGQYWYRQDRPYRFVPVKKFADAFSIFHVGRSTQNELSEPFDRTRSHPAALATSKFGASRMELLKATIDRELLLMKRNAFMYIFKAVNLTVMSFIVMTTFFRTNMKRDASYGNIYMGALFFALDTIMFNGFAELAMTVMKLPVFFKQRDLFFFPAWAYTIPSWIVQIPITFLEVGVYVFTTYYVIGFDPNVFRFLKQYLLLLALNQMSSALFRFIAGIGRDMVVSHTFGPLALLAFQALGGFILARPDVKKWWIWGYWISPLSYAQNAISTNEFLGHSWSKIQNGTTVGIGVLQSRGVFTEAKWYWIGLGVLVGYALLFNLLYTVALAVLSPFTDSHGSMSEEELKEKHANLTGEVIEVRKEKTSRRQELELSHSVGQNSVHSSEDSSQNRKGMALPFPPLSLTFNDIRYSVDMPEAMKAQGVTEDRLLLLKGVSGSFRPGVLTALMGVSGAGKTTLMDVLAGRKTGGYIEGDITISGYPKKQETFARISGYCEQNDIHSPHVTVYESLLFSAWLRLPSGINLETRKMFIEEVMDLVELTSLRGALVGLPGVSGLSTEQRKRLTIAVELVANPSIIFMDEPTSGLDARAAAIVMRTVRNTVNTGRTVVCTIHQPSIDIFEAFDELFLMKRGGEEIYVGPVGQNSSKLIEYFEGIEGISQIKDGYNPATWMLEVSSSSQEEILGVDFSEIYRQSELYQRNKALIEELSTPPPGSSDLNFPTQYSRSFFTQCLACFWKQKKSYWRNPTYTAVRLLFTVVIALMFGTMFWDLGRKTNKQQDLFNAMGSMYAAVVYIGMQNSGSVQPVVVVERTVFYRERAAGMYSAFPYAFGQVAIEIPYIFVQTLLYGVLVYSMIGFEWTVAKFLWYLFFMYFTLLYFTFYGMMAVGLTPNETIAVITSSAFYNVWNLFSGYLIPRPKLPVWWRWYSWICPVAWTLYGLVASQFGDIAHPLEDSPTGQTVAQFITDYFGFHHDFLWVVAGVHVGLTVLFAFLFSFAIMKFNFQNR

SEQ ID NO: 69559 - protein, 363 aa, Zea Mays
MCTLSGAPRRLLEVQNWLLFTSELIHATVSHGSGAIAERMPLIQILVPHIMGLKEQLKDPSKDEEDVKAIARLYADMGESYVDLIATGSDDSIQIVNALLEVTSLLEFDISSMTFNFWHRLKRNLIKRDSYVSYGSEVAIEAEKNRRLQVFRPKFETLVSLVSFRVEYPEDYHTFSEEDRRDFRHVRYAVSDVLLDATEVLGGDSTLKLLSTKLAQAYGSCNNEQNPKWQPVEAALFCIQAIARSVSIEEREILPQVMSLLPCLPHHEQLLQTVCSTIGAFSKWIDAAPAELSILPPLVDILNKGMSTSEDTAAAASMAFKYICEGESSQGPWMASSRYTILQSVELVVIKFLQRTRCIWLKP

SEQ ID NO: 69560 - protein, 553 aa, Zea Mays
MSCDALLANPATSLVVPAIGIIVFALWGFLPLMRDIRNRFDHGGNWKKSPTYLISSSYLQPLLLWTGATLICRGLDPVVLPSAASQAVKTRLITFVRSLSTVLAVAYILTSLIQQVQKFLMDMRNPNDTRNMGFDFTMKALYTGVWIASVSLFMELLGFNTQKWITAGGFGTVLLTLAGREIFTNFLSSVMINATRPFVVNEWIDAKIDGVDVSGIVEHVGLWSPTLIRGVDREAIYIPNHKFTVSILRNNTQRTHWRIKTYLAISHMDAGKIGTIVADMRKVLAKNPHIEQQKLHRRVFFEKIDPKNQALMIFISCFVKTSHFEEYLNVQEAVMLDLLRIVGHHKARLATQIRTVQKSYGNADFDNIPFGEDMYSRVRGRPLLIDTSARISDDKPRPRPVSSREEQKVKTNGSVDIKSSSPENASSSNSEKQEPKKMVPEDTRVKNIKGDNVMPVTPSLDPATSTSKAGKGKTREPEPTERQGDGSVSVANPKKESRPVFEDNIVLGVALEGSRRTLPIEEGNPHLSLSETEVDTEEAASSPKDKIGQSPKL

SEQ ID NO: 69561 - protein, 380 aa, Zea Mays
MESLWKLTYLLEPASLALIATAISVAYASASRALDYGKEMERNLDFSEASITLDRSQALMIPLASSCSLLLMFYLFSSVSHLVTAFTAVASAMALFFCLSPYVTYLKMQFNLMDPFVSRCCSKSFTRLQGLLMLFCIATVLAWLVSGHWLLNNLLGISICIAFVSHVRLPNIKICALLLACLFVYDIFWVFFSERFFGANVMVSVATQKASNPVHTVANKLSLPGLQLITKKLELPVKLVFPRNLLGGIVPGSNPGDYMMLGLGDMAIPGMLLALVLFFDNRKFKDVNFPPDVSPPKRRNYVWYAVTGYGIGLVAALAAGILSQSPQPALLYLVSVARLYGQVPSTLGPVMYLSWLRNELWELWEGSGTILNEKAHLLEV

SEQ ID NO: 69562 - protein, 655 aa, Zea Mays
MLRETNLSPPSHRAVLALAAAPLPRLPPAPAALSPAPPAMGLLTSAELNYLVFRYLQESGFIHAAFTLGYEAGIHKCGIDGNAVPPGALITIVQKGLQYIELEASSDENYDEVERDFALLEPLEIITKDVEELQQIVKRRKIERSQTELEKDKGKEKERNEEHERRPCGEREREQHEKEKEQVRDKDKSEKDRDHDKEKEKERERQHAERTDKVKHEDDSLVGAGPTPMDVSTTVQEISNTDVTVLEGHSSEVFACAWSPTSSLLASGHMLWHTKQLHAIITENVISGQIFDTFENQKRCSHRCYPASREGEWMRGVIWVRNVGRSGDSTARIWTIPYGPCGSDMQPYSPGVHVLKHFKGRTNEKSKDVTTLDWNGEGTLLATGSYDGQARIWSRDGDLKQTLFKHKGPIFSLKWNKKGDFLLSGSVDKTAIVWDTKTWECKQQFEFHSAPTLDVDWRNNNSFATCSTDNMIYVCKIGEQRPIKAFSGHQSEVNAIKWDPTGSFLASCSDDWTAKIWSMKQDKCIFDFKEHTKEIYTIRWSPTGPGTNNPNQQLLLASASFDSTIKLWEVEQGRLLYSLSGHRQPVYSVAFSPDGEYLASGSLDQCLHIWSVKEGRVLKTYRGTGGIFEVCWNIEGTKIAACFSNNTVCVMDFRM

SEQ ID NO: 69563 - protein, 199 aa, Zea Mays
MTWRVHSRLRSLGSRAAAWSSAPPSTTASATASAPRSSSTPEARAAAGLLRQRLRARVRQVHGGPADVPVLRLGRALRGAAGAGRQGVRGRRLRALHGRPPGGAARRPPGPGGQPGDLGVDAPGPRGPGLRRRQGRAHGPAHQRDLLRLPARGRRPARRHCARLRPAGRRRQVPALLPRVPQGRRSGREAHLSYYGYDV

SEQ ID NO: 69564 - protein, 265 aa, Zea Mays
MNIPLAGIEAILSSNDLQVASEDTIYDFLLRWARAQYPKSEERREILSSRLLPLVRFSHMTCRKLRKVLTCTDIDHEQATKCVTEALLYKADAPHRQRALAADTTTCRKFAERAYKYRPLKVVEFDRPYPQCIAYLDLKREECSRLFPAGRIYSQAFHLAGQGFFLSAHCNMEQQSTFYCFGLFLGMQEKGSTSVTVDYEFAARTRPSGEFVSKYKGNYTFTGGKAVGYRNLFGIPWQAFMADDSLFFIDGMLHLRAELTIKQPT

SEQ ID NO: 69565 - protein, 1122 aa, Zea Mays
MVDVSRRIDDYRQHPHFSVLASSLVSSRVSECLKSSKLYSKKADGETSTDTYGMKWLKDVVLSKRSDNVFRSIMVGDPKIKLWEIGIPEDLSSSLVVSEHVSSYNFQSTNLKCNLHLLAKQELFIRRNGKLMFLRKADQLEIGDFDGDCLHGYIPQSIRSRVELEELVSLHNQLLNMQDGRNLVSLTHDSLAAAHLLTSTDVFLKKSELQQLQMLCLSVSTPAPAVIKSMNFQGSLWTGKQLFSMLLPSGMNFSCDTELHIMDSEVLTCSLGSSWLQNNTSGLFSVMFKQYGCKALDFLSSAQEVLCEFLTMRGLSVSLSDLYMFSDHYSRRKLAEGVKLALYEAEEAFRVKKILLDPINIPVLKCHDETEDVTYRQSDCIQSNPSVIRSSIMAFKDVFRDLLKMVQQHVSNDNSMMVMINAGSKGSMLKYAQQTACIGLQLPASKFPFRIPSQLSCISWNGQKSLNYEAESTSERVGGQNLYAVIKNSFIEGLNPLECLLHAISGRANFFSENADVPGTLTRKLMYHLRDIHVAYDGTVRSSYGQQIVQFSYDSVDDLVDKLGAPVGCRAACSISEAAYGALEHPVNGLEDSPLMNLQEVFKCHKATNSGDHIGLLFLSRHLKKYRYGLEYASLEVKNHLERVNFSDLVETIMIIYDGHDKIRNEGMWTTHFHINKAMMKKKRLGLRFVVDELAKEYDTTRDQLNNAIPSIRISRRKCLVGDEGVKSSSCCIAVVAHAERNSISQLDTIKTRVIPSILDTLLKGFLEFKDVEIQCPHDGELLVKVCMSEHCKGGRFWPTLQNACIPVMELIDWELSQPSNVSDIFCSYGIDSAWKYFVESLKSATTDTGRNIRREHLLVIADSLSVTGQFHALSSQGLKQQRTRLSISSPFSEACFSRPAQSFINAAKQCSVDNLCGSLDAVAWGKEPFNGTSGPFEIMHSGKPHEPEQNESIYDFLCSSKVRNFEKNHLDTRRQSTENASICRLACKSSKGSTTVNGVAITIDQDFLHAKVSIWDNIIDMRTSLQNMLREYPLNGYVAEPDKSQLIEALKFHSRGAEKIGVGVREIKIGLNPSHPGTRCFILLRNDDTTEDFSYHKCVQGAADSISPQLGSYLKKLYYRA

SEQ ID NO: 69566 - protein, 211 aa, Zea Mays
MLTTFFICSMLHRMPNKPLSALTLQDRDIEIQIEVHRKWEFRGAIDNGPILHIDMILTDCIGNAIHCQIPSFPAAKRGDEFQVGKIYKMSRFPVARAKSSYKPVDGDLMFLTSYDKIDPNEPNARNFHDVISIITEISAIKPVGNARIPSSYNRHVLIKNLSDSILKITLWGKRAQEFYLTNTYDPQKQTLVIVLFVGCLPKEFQGLNLRR

SEQ ID NO: 69567 - protein, 1386 aa, Zea Mays
MTHAETEETHWVRSPARSGGRRVLHPSWDADISCGIHAIMACNANISCVFMHTSCYTHCAVDNALVLFFNELYYGYVVPCFGDLTAVEDAVNRVTDNTNAAHELDILSLRTQLGSLTTILLCVDVAATSAKSVHMCRFLLDEATSMLSEIFPGRSPKVGPTYWDQIQELATISVIKRILQRLHDILDLDTLPSLQVFFTEMSISSSTECSRVGQKQRPLGLLHQMIDDAFKGKRQFLSGKLHNVARAIVDEDFDTVYSKEGVNLEKKDILSSEKGILLGHGLRILKQASRSDLASSNVVDSGPEHKGSANRYLGPLSTKPSTYLSNFIIYTATIGDIVDGTDTTHDFNYFSLVYEWPKDLLTRLVFERGSTDAAAKVADTMSVDFVHEIISACVPPVLPPRTGQGWACIPVIPTICNISSENRLCTKSSPAQGWSAHDSSLSSRQEPLYPLQLNLVKHLAQLSSVRAVLACVFGSSILSGDNESSFTHVKDSTQAPETERSFFEFALEQSERYPTLNRWIQMQSNLHRVSESSITDKSEVSLHQSKGKFCMKRTRESDSDGESELEENVISGNTSSSSLESTKHEDARLEPTTFISFDWENEAPYEKAVERLISEGKLSDALAVSDRCLRNGASDNLLQLLIEQKEEKGPGTGQIHPYGSHSLGNDTSQYCLRLRDKKVAAQLALKYLHSWDLDAATNVLTMCMCHLPENDPMRSEVLHMKQSLQRYGHIMSADEHYTRWQEVEADCEDDPEGLALRLAAKGAVSAALEVAESASLSIDLRRELQGRQLVKLLITDPLNGGGPAAASRFLSTLRDSNDALPVAIGAMNLLPDLRSKQLLVHFFLKRTVGNLSDAEIARLNLWALGLRVLSLLPLPSQQRCSSLHEHPQLIVEVLLMMKQLQSASLILKEFSSLRDDKLIIAYAKKAISINVSSAPRERRSNISASRAKQKKATTPAKTNFVQSFGNFQREARKAFSWVPRDSGTKTPPKDILRKRKSSGSGGDRSSWEAMPGLQEERTPVYPSEAQERLPFVSAPDEWVLTGDPDKDDATRSSHKYETSPDITLFKALISLCTNESVAAKGALELCMTQMKVVLSSQQLPLDASMDNIARAYHATETYVQALSYAKNLFKKLVGSSDLSSGSERSKEVDDVSVDTGSSSTGSQYLDELSDFLTQADMWLGRAELLQSLLGSGIIASLDDIADKESSSRLRDRLVNDERYSMAVYTCRKCKIDAVPVWVAWGHALVRMEHYAQARVKFKQALQQYKGDATSVVTEIINTIEGGPPVDVSSVRSMYEHLAKSAATIFDDSLSADAYLNVLYMPSTFPRSERSRQSRGHVDSQFRTASSYLEDGPRSNLDSVRYAECIHYLQDSTNHGRGNIFVFSSME

SEQ ID NO: 69568 - protein, 278 aa, Zea Mays
MAMQCKSMCSFCLQVQSEVNFLGRLWHPNLVRLLGYCGEDRELLLVYEFMSKGSLENHLFRSRGGNLEALSWSRRLKIATGAARGLAFLHSSEKQVIYRDFKASNILLDSDFTAKLSDFGLAKNGPSAGKSHVTTRIIGTYGYAAPEYVATGHLYVKSDVYGFGVVLLELLTGMRAHDPNRPSHQHNLVEWARPYLSGAGSKLKTLMDQRIDGQYHTKAALRAARLAGKCLTGDPKSRPSMDDVVAALEDIEALQQQAAGGHRDLPPRPGARRSAAVP

SEQ ID NO: 69569 - protein, 95 aa, Zea Mays
MANSIVASLANTVGAAESVLRVAATGHDKKLFFKVVSTLYFLAALGRVVSGAAVAYAALCIFCLYMFAQSTDLFDQLPSWVPVGRDSLGGTQDTA

SEQ ID NO: 69570 - protein, 489 aa, Zea Mays
MAPFGDGGVGCGDGGEALRGWDPLRSGSAPPTMEGAAAAAAAAERRVFGGGGDGASFFSGIDGLMFGARMDEVSRCRGAAGAQEHFGNSTSLSVGPSGQLFNGAGDWDEWQFGPSTVHSGGAMANYAFDMNLLWTDMNPDNAEYHRNIQNHFMSNIENMNAYGNRDLDASSMFDSDISDALSGLRLSNNSVMDQRNNREELADEILERQRDFSKTVDETRSSLVGNVFHAPRSDVHPSRIYGDGILRRQTSACALDGSNVSRINRHHIKGVDRPSLADQLAIMQSGNFPRGTNLSRNVSVTNMSNPMSNRYNSNTDLDLARSRMTFFKEILAQQYLQEDNLSYNDSRIYHDEPCFPCSRMQRSGSHFYSNSRCILSHGDRQSRLLSLNRKAMGRNIGSHAYHDNTLSNYLDVLSLDNADRNGADSVELIDLVGHVKEISMDQYGSRFIQQKLEIASLDDREKIFPEILSNAIALTTDVFGNYVIQKKGS

SEQ ID NO: 69571 - protein, 325 aa, Zea Mays
MQVCLRRGLSLVRQHTSRVLPPLSLHPTRFFLHQSASDPMGEGSVPGKDAKGKGKAKHPAQASALVARDDSYLEAVTHKRIRLFEEIQARQAVERLNIGGEVIKITLPDGAIKEGKKWITTPMDIAKEISSGFAASCLIAQVDETLWDMGRPLEGDCKLQMFKFDTNEGRDTFWHSSAHILGESLERAYGCKLCIGPCTTRGEGFYYDAYYNELTLNEEHFGVIENQAKKAVAEKQPFERIEVSRAEALEMFAENKFKVEIINELPEDKTITVYRCGPLVDLCRGPHIPNTSFVKAFACLKASSSYWRGKADRESLQRVYGNIFP

SEQ ID NO: 69572 - protein, 447 aa, Zea Mays
MPDLSTSYLPPFPELSLDAGALAVDHAGNAAAAASADAASAYASSSASVGSGVDDLVIPAECRWKGHVRTFDMAGAGAVTTCPAARRGGGKKLSLIPSLEPARTQASASAPTLEERVSEWAAKKAAAGVPTHHCVLPFLTGAPMAVECRLCSKIIYVGEEIKCSVKKCPQMFHLKCVAEDTSNFTVESFRCPQHGCMVCKQKMFFWRCGRCTVAAHTKCAPWPVVHLKNDQGSAICWRHPSDWLLQNKNADFTNSVEEVFCRLPLPYVNEDLNIDSIIRDYAEAVYKPPPYTSIRRNVYLIKKKRTGVRVDIGCTNCRADSTCKEDCECRGLSMSCSKNCRCSDLCTNRPFRKDKKIKIVKTKRCGWGAVALEPLERGDFVIEYVGEVIDDATCEQRLWDIRRRGDKNFYMCEISKDFTIDATFKGRLMVRQELVSLPLVPSKLESP

SEQ ID NO: 69573 - protein, 133 aa, Zea Mays
MDASAAATDVEVDEQSPLVVEGIGLSSGVNVEDESVFDWASMVLSGLWEEEGRHDVPSETQMYSQLGLIEENEAEENRRDEALRGGTTNFDESDHVDSGDQNTNQPCEDYLPDEKRAKYDKINPSMQPVCFRT

SEQ ID NO: 69574 - protein, 110 aa, Zea Mays
MCLPSFAVSAAFISRPRSPHPLPTCGASIRGIRHPRAALLDAHVRLCSPPAWPHLLLTCGPARRPHVLHPLLACGPARHPRIVLSTADTVVPVARRNVQFHSPAYALRSD

SEQ ID NO: 69575 - protein, 268 aa, Zea Mays
MFFPAAVIEEDNDSYIHTKGRPSAGSSHENKKGLELLKAAIEKAGYTGKVFIGMDVAASEFFSEKDKTYDLNFKEENNDGSNKISGDSLKDLYKSFVSEYPIVSIEDPFDQDDWTTYAKLTGEIGQQVQIVGDDLLVTNPTRVAKAINEKTCNALLLKVNQIGSVTESIEAVRMSKRAGWGVMASHRSGETEDTFISDLSVGLATGQIKTGAPCRSERLAKYNQLRLGSRKSSVLPQSTPERSSEHQWSPTEPRVPRAWRKKMRMFPH

SEQ ID NO: 69576 - protein, 770 aa, Zea Mays
MASGGAPPTVAVAVRPGGSGSRLAARWVAAGLPGNGRATAITVVHVIPELSYEPSPTGERVPMPLVGREPAEAYAWDRRARAEEALLPFRRLYCCGLANVTVETVVVEGDGVAEALLRYIRESGVRSLVLGSASFRWFRRALSIPDVPGTVIQATQNSCNVFVVSKRRLIMKLARYPQTSESNRNLRIESISHETFALSHRSLLFDNFGDDEAQSDSFSQSHSSHSASNVVSSSESSEQVASGSSGVNYAATEGSKNYDSLSSWGEDPWVASNSSEECQSTDDVSKLRKELQETLVVYDKACANLVSVKKKIQVLSIECSEEARKVEHALEWEEALKQTVSDEKAKQLEVISEVEQAGKSFTREAYSRYKTEMAASMICQDKVQIVDAILTKSRSCRRYSKRDIELATDNFSEERKIGEGGYGNVYRCTLDHTEVAVKVIQENSIDKTDEFLKEVEILSQLRHPNLVLLLGFCPEIGCLVYEYLKNGSLEDQLFNSEGCQPLHWFLRFQVVFEVSCGLAFLHARSPEPVVHRDLKPANILLDRNYVGKVGDVGFAKFVSDLVPDWQTEYKDTIVAGTLYYTDPEYQQTGTVRPKSDVFALGVVILQLLTGRRPDGLVASAENAVRNGRLADILDWSQAGWPLAEAEVFARLGLRCAALRCRDRPDLESEVLPELDEILHRITFAVSLRSPKLTSVPSHFVCPITQELMEDPHVAADGHTYEHYAIRAWLKRHRTSPVTRSKLQNSSVIPNHSLRGAIQQWKSQLPAQTNE

SEQ ID NO: 69577 - protein, 56 aa, Zea Mays
MYDQNEYLVEKITTWDRALMSPNALSMSICVPSWHPINIHISRVYGRGMIFTNIGH

SEQ ID NO: 69578 - protein, 381 aa, Zea Mays
MAPSSLTPCSALSIHVINKNGNEDALPVCLEARPVERGAGDMIGVGALSTKETEIKCIKGTKTLWSDRISGKVTVLAGNANFWAVGCEDGFLQVYTRCGVRAMPAMMMGSAAVFIDCDDSWKLLLVTRRGLMYIWNLYDRACILHDSLASLVASPDESSAKDAGTVKVISATFSRCGSPLVVLASRHAFLYDMSLKCWLRIADDCFPASNFASSFSFPQGGELGKLQIDIGKFMARKPIWSRVTDDGLQTRAHLENQLASSLALKSAQEYRQCLLSYVRFLAREADESRLREVCESFLGPPMGMVGSASPTDPKNLAWDPDVLKHKLLKEDILPSMASNRKVQRLLNEFMDLLLEYETDVTLIPQPGTEGNGNGNDKVMTS

SEQ ID NO: 69579 - protein, 52 aa, Zea Mays
MQTKHDSRSHHSPTVMKAAPICNLSIAKSSPESVRMLVSFAALLKCQKRSSV

SEQ ID NO: 69580 - protein, 1184 aa, Zea Mays
MADSRRTWSWDVSGFEPPQPATTQAASAPTAMPRAPPTAMMPRPSAGAPRASAGAVPVADQLDQLVDSVQLAREDCLELRQEASDLLEYSNAKLGRVTRYLGFLADRTRKLDQAALETEARITPLIHEKKRLFNDLLTLKGNVKVFCRCRPLFEDEGPSVLEFPDDFSIRVNTGDESLTNPKKDYEFDRVYGPHIGQGELFLDVQPFVQSALDGYNISIFAYGQSRSGKTHTLEGSSHDRGLYLRSFEELFDLSNSDTTSTAHFNFYFTACELYNDQVRDLLSESSSTVPKVRMGVQESFVELVQEKVENPLEFSAALKIALQNRSVNSPKAMVSHLIITIHIHYRNYVTGEHLYSKLSLVDLPASECLLEEDANRDNVTDFLHVSKSLSVLGDAFASLSAKKEPVLYGNSRITQILADSLGSSSKILLIVHVSPSASNLSRTLSTLSFSARARNAELSLGNRDTIKKWKDVANDSRKQLHDKEKEVLDLRQEVIGLKHSLKEANDQCILLFNEVQKAWRVSSSLQADLKSENLMLAEKHKTEKEQNNQLRDQISHLLKVEQEQNLKMQERDLTIQSLQTKLKSIESQLNEALNASDARSTIGSESASVISSPKITESTADSSSVTKRLEEELAKRDALIEKLHEENEKLFDRLTEKSGLGSAPQASSPSANKPANGQGREIGRSDSSKSRSPDVFASPVSQDKTGNSGAIVKSSNELAKTTPAGEYLTSALMDFDPDQFEGFAAIADGANKLLMLVLAAVIKAGAAREHEILAEIRDAVFSFIRKMEPKKVMDTMLVSRVKILYIRSLLAKSPELQSIKVSPVERFLEKSNTGRSRSSSRGSSPGRSPVHHHGHGSRTALVDEHVHGFKVNIKQEKKSKFSSIVLKLRGIEEETWRQHVTGGKLREITEEAKAFSIGNKALAALFVHTPAGELQRQIRAWLAENFEFLSVTGADAAGGAAGQLELLSTAIMDGWMAGLGTAQPPTTDALGQLLSEYTKRVYTSQLQHLKDIAGTLATEEADDPAHVSKLRSALESVDHKRRKSLQEDPDDPAPQSNALGEGEVSQWNVLQFNTGTTAPFIIKCGANSSGELVIKADLRVQEPKGGEVIRVVPRPTVLADLSFEEIKGVFEQLPEAVSLLALARTADGTRARYSRLYRTLASKVTALKETVAEMERGGVFKDVR

SEQ ID NO: 69581 - protein, 804 aa, Zea Mays
MAFSPRSPWSRAKKTDVYSTFVVHGDDDEDDARGGRGPSTRAEEDEEEDPSSLPPLLQRLPKDFGGASFDDDEDPYSSDPDDASLSATAAFKSGVPASGRSPFLDLRRSSPRATDDDPYSTFVVHSTTRSGRTSSSPRGSASGTFIRRSGGSSSPRESVSGTFIRRTGSPSSPGKSASGTFIRRPGSPSSPRGSFSGTFIRHTSGGSSSHESASGGGGGFGSSFWTPAVEQSEELRQPSPLMQQQQQQHSRRKPSVSSVPDSVTREDPSTKYELLHELGKGSYGAVYKARDLRTQELVAVKIISLTEGEEGYEDIRGEIEMLQQCSHPNVVRYFGSYQGEEYLWIIMEYCGGGSVADLIGITEEPLDESQIAYICREALKGLAYLHSIFKVHRDIKGGNILLTEQGEVKLGDFGVAAQLTRTMSKRNTFIGTPHWMAPEVIQESRYDGKVDVWALGVSAIEMAEGMPPRSTVHPMRVIFMISSEPAPMLEDKEKWSLLFHDFIAKCLTKDPRLRPAAIEMLKHKFIEKCNSGASKMLAKIKVAKKIRATLAVQNELSDPDNTTQDVPFRINEDYGETVPTSSQQHMKHGTYNDCQAGDFGTMIVHTEDGDEVTESPIFPRTEFIPGLGSINSFTHDPKRAELISSFWAENIGDSDANKDRDTDYGPDMQESKVISPLTGTVKKNIGAEGTIRCHDNQINLSPGLANTTTKLNNSPSRKAFSVQDKLWSIYAAGNTVPIPFLKAIDISPLALVSENESGNGLAGSSTNDALEAVRELFSGDGQAKKGRKGQNEVCGRFFSLTLAE

SEQ ID NO: 69582 - protein, 181 aa, Zea Mays
MHQGYPKETLVRFLKAREWNVAKAHKMIVECLNWRIQNEIDSVLERPIAPVDLYKSIRDSQLIGLSRYTKEILLYNFDGGTICSVVILKEWLGIHRVAAAEISKGLPIFGIGVGHSTYDKASAIATAKIIKVPGLKLSALSQIKDSGSHQVTPPHVDFADVSILVVELRTTIRCPDRERWS

SEQ ID NO: 69583 - protein, 640 aa, Zea Mays
MFGSTNPFGQSSTSPFGQTSFGTPQGFGQSSTAANNPFAPKPFGSPTTAFGAQTGSSLFATTSTGAFGQQQSTPAFGTTSTGAFGQQQSTPTFGTTSSSQFGSSTPAFGASPTPAFGATSSGSLFGQKPSFGGFGSSSSQSSPFGNTFQQTQPTFGSSTFGSSTPPAFGATAPAFGTTTPAFGTTTAPAFGATTSPAFGSTSTSLFGASSAPMFGSSAFGTSATGFGTSGTTAFGVSSTTPGFGSSSTPSFGTSASAFSFGSSPSFGQTAVSSGSTPFGTTPSPFGAPAPAFGSQTAAPTFGQPQFANQAGGTRIKPYSQTPDVDSATSGTQPAAKLDSISAMPEYKEKSHEELRWEDYQRGDKGGPNTSGTQTLAPSFPSPIQHNTFASTSNPFSTNPFSTNNPFAPKPTTTTSSPFNTSFNNASVASSSLFTSSPGTTMFGQPGVSTLPAPATFAQPTSSTPAFSSGSLFGSTNPGSLFTSSGPSLFSTPTFQPSAPAQSSNMFSFQPPIQPAASTGGLPFFPNTNQALTGQPTSSLSSMVMQSALVSNPFGMLPAMPQMSIGNGGSSPSVQYGISSLPVAEKPLPSRSLSMAVPRHLSQRRIKLLPRKYNPISDGKNLQQHQRQMLFSSLERTQGTW

SEQ ID NO: 69584 - protein, 488 aa, Zea Mays
MEDTLKSLSMDYLNLLINGQAFSDVTFNVEGRLVHAHRCILAARSLFFRKFFCGAEQAAAGPGALLLDHLSPRSPSGTSSPRGASAAAPGAAVIPVNSVSYEVFLLLLQFLYSGQVSLVPQKGEPRPGCGERACWHTHCAAAVDLALDTLAAARSFGVEELALLTQLAGMVEKASIEDVMKVLMASRKQDLHQLWTTCSHLVAKSGLPPEVLAKHLPMDVVSKIDELRLKSSLSRRSPFLAHHHHPAPGGGMEASSAADIDDHHKIRRMRRALDSSDVELVKLMVMGEGLNLDEALALHYAVENCSREVVKALLELGAADVNHTAGPAGKTPLHVAAEMVCPDMVAVLLDHHADPNVRTVEGVTPLDILRTLTSDLLFKGAVPGLAHIEPNKLRLCLELVQSAAMVMSREDAHTAVNAAPMYGEPSGGGGCGVYSASGTSSTSLVNLNLDNRMVYLNLGMDAQFGKMGDGDDGGGRGPSSLFSPHGYH

SEQ ID NO: 69585 - protein, 419 aa, Zea Mays
MAGGGGGSLSSPSASFLSSPTPTPPPRLLRRCSTKSASRDSPILRPKKPPPLFCAAAATPTPAPAAASKSAGSWRDLCSLNAWVVRDYRRLVDSVGALEPALRRLSEEQLKAKTAEFRSRLTRGETLADVQADAFAVVREAARRTLGMRHFDVQIIGGAVLHDGCIAEMKTGEGKTLVSTLAAYLNALTGKGVHVVTVNDYLAQRDAEWMGRVHRFLGLTVGLIQAGMKSDERRASYRCDITYTNNSELGFDYLRDNLSRNKEQLVMRWPRPFHFAIVDEVDSVLIDEGRNPLLISGEDNRDAVRYPIAAKVAELLMEGVHYTVELKGNNIDLTEDGVAHAEIILGTDDLWDENDPWARFVMNALKAKVFYRRDVQYIVRDGKAIIINELTGRVEPKRRWSDGIHQAVEAKEGLKIQTR

SEQ ID NO: 69586 - protein, 387 aa, Zea Mays
MEAIRKKDKVSPLPDKDYVPMGPVYRNAHVFHRSYLEMERQLKVYVYEEGEPPVFHDGPCRSIYSTEGRFIHSMETETEAEEGRRLRTRDPARAHVFFLPFSVVKMVQTIYEPGSRDMAPLKRTVADYVRVLSSKYPYWNRSLGADHFMLSCHDWGPYVSSANAQLFGNSIRVLCNANTSEGFDPARDVSLPQVNLRSDAVERQVGGPSASRRPVLAFFAGGNHGPVRPALLAHWGPGGRRGGDPDVRVSEYLPRGGGAPSYADMMRRSRFCLCPGGYEVASPRLAEALYLGCVPVVVDDGEYALPFADVLDWDAFALRLRVADIPRLKEILAAVSPRQYIRMQRRVRMVRRHFMLHGGPPRRYDAFHMILHSVWLRRLNVRIAAAE

SEQ ID NO: 69587 - protein, 195 aa, Zea Mays
MGVCAIIMKLLMDAVASSRKAEIEWEKEYGPPSFTYKDLSAATRGFEDKMLLGRGGFGSVFRGVLHHSEQMMVAIKRVSPESKKQGMKEFIAEIVIILGHLRHRNLVPLIGYCRHKGELPLGWAQRRCTSSEASRPAFYFYLHEDWEQVVIHRDIKTSNVLLDSEMNARIGDFGLALRGLARQPKQPMCLRSVCS

SEQ ID NO: 69588 - protein, 920 aa, Zea Mays
MLVDIVDLSSDDDEVAVTEEHSVDGKGVYAKANFFDLTIDDGILEGEHIAYEQEQGDSAQGTSFYKQEFIADDGQAEAAQCIVTLELQNLGADGGCYASQCTETLLVQQLRRNDGQNDAAHSTGTLPIQELRTDGGQHDAAQCTTSLHMQELRATDVQGDAACFTPTLQRQEHTAGNEQGDTVQYTTTQQGQESIADDTRGDFTHCTTALQWQGSHKAQCTTTLLRQEFLAAGDRMQDAALLRNSAEATTSLTSTQQGRHMRTELFNVSTATPFPRQFWKAGEKAGDYGLASQADLNNDHNRLQIHPKFLHSNATSHKWPFGDIDKLVLELINFCYTAIAELLDNAIDEVSSGATFVKIDKMKHSPKGDYSLVIEDNGGGMSPKSLRQCMSFGFSQKSTTSSIGQYGNGFKTSTMRLGADAIVFTCTKDDRRLTRSIGLLSYTFLMRSNCNDIFVPVVDYELDALSSTFKRKMNCGEKHFLSNLFTILKWSPFSTEDELLNQFSNMECHGTKIIVFNLWLNDALEMELDFITDKEDILVSGAPEIRAGRNTVESLTQMHVANRFRYSLRVYASILYLHVPENFQIILCGRAVEPHYVVNDLIYRECIIYRPHVQVTTEVDVITTIGYLKGAPRLDIYGFSVYHKNRLILPYWPAGSCSGRRRGIAGVLEANFIRPTHDKQDFERTGLFQRLETRLKDMAKEYWTYHCHMVGYTRVMKKPPPAHYVSTIAEKGDDNLAAQSTTKTYGYNSRARVPVALQPCSNAYNTQDPMHADVGVVMDQMNYGACPSMTINVGTTLHSLRYAPQQSQSELCKRRKSSEIHWRSQKKQNTNIYSDKPESDSGTEMAEFRVVLDSSTMLKAECSELEAAGKQLASKADKLRIELDVWQRMYQGLSDKLRSYDGLQRLRCSRHCSSSSIGFI

SEQ ID NO: 69589 - protein, 106 aa, Zea Mays
MSSQRLPVVTVVVGRRREAAVQCSSSSARRRPEGGGQSLYLSSAEGILKSRCATRRASCHGCAFAHHRRRLKCRCFCAFLGVFWRKSRRTGLLHWGHRGSSCGSMT

SEQ ID NO: 69590 - protein, 326 aa, Zea Mays
MATSSKPAAPVDPMVVLAHEFPEVSFDYDERDVALYALGVGACGDDAVDEKELHFVYHRDGQPHIKTLPTFVSLFPNKNSNGLGFVDVPGLNFDASLLLHGQQYIEIYRPIPSYASVVNRVKVAGLHDKGKATILELETTTSLKESGEILCMNRSTIYLRGAGGFSDSSRPYSYATYPANQVSRISIPNSAPSAVCDDQTKQSQALLYRLSGDYNPLHSDPDIAQLAGFTRPILHGLCTLGFAARAVIKSFCNGEPTAVKSIFGRFLLHVYPGETLSTEMWLDGQKVHYQTKAKERNRAVLSGYVLLQHIPSSLMDDKIKDNKVVQ

SEQ ID NO: 69591 - protein, 943 aa, Zea Mays
MSDVSLDLGGIRAGPVERDIEQAITALKKGAYLLKYGRRGKPKFCPFRLSNDESVLIWFSGKEEKHLRLSHISKIIPGQRTSIFQRYPRPEKECQSFSLISHDRSLDVICKDKDEAEVWFAGLKTLISRCHQRKWRTESRSDLLSSGATSPRTYTRRSSPLSSPFSSNDSIHKDGSDNYRLRTPYGSPPKNGLEKAFSDVMLYAVPPRGFFPSDSNAGSVHSMSSGHSDNTNGHPRGVPMDAFRASYSSAVSSSSHGSGHDDGDALGDVFIWGEGTGEGILGGGGSRVGSSSGAKMDCLVPKPLEFAVRLDVQNISCGGRHAALVTKQGEIYSWGEESGGRLGHGVDCDVSQPKLIDALSHMNIELVACGEYHTCAVTLSGDLYTWGDGTFKFGLLGHGNDISHWVPKHVNGPLEGIHVSSISCGPWHTAVVTSAGQLFTFGDGSFGVLGHGDRESISVPREVESLKGLRTVRAACGVWHTAAVVEVMAGNSSSSNCSSGKIFTWGDGDKGRLGHGDKGPKLVPTCVAALVEPNFCQVACGHCLTVALTTSGHVYTMGSAVYGQLGNAQADGMLPVRVEGKLHKNFVEEISCGAYHVAVLTSKTEVYTWGKGANGRLGHGDTDDKNTPTLVEALKDKQVRIVVCGINFTAAICIHKWVSGVDQSMCSGCRQPFNLRRKRHNCYNCALVFCHSCSSKKSLKASLAPNTNKPYRVCDTCYSKLTKGLETDMHSSAKRAATVPGVSDANEEDLETRSNAQLSRLSSMESFKHLDSRYSKKNKKFEFNSTRVSPVPNGSSHWSGLNISRSFNPVFGSSKKFFSASVPGSRIVSRATSPISRRASPPRSTTPTPTLGGLTSPRVVPNDGKPTNDALSQEVLNLRSQVESLARKSQLLEVELERTTKQLKEAISIAGEETAKCKAAKEVIKSLTAQLSSDGQLHSLCNS

SEQ ID NO: 69592 - protein, 155 aa, Zea Mays
MVQEVHKSFIFTKSGFYGSCWLLVLPRNLLPIIVFIKKLVCTLYKETNECEIMCTKAKWSFSDSRPSLDHLDPSTMKSAVTVLQDVGLWLEEINLGSYRQAFEENGVNGEYLESLSVFTTEQILRFIRRCHMKWGDFITLCKELRRIKGSNFFCF

SEQ ID NO: 69593 - protein, 517 aa, Zea Mays
MSARRSSAGSDDRDQARLQQLGYKQELKRGLSVVSNFAFSFSMISVLAGVTTTYNTGLRYGGPASMTLGWLVVALFNGCVALSMAEICSAYPTTGGLYYWSAKLAGKDWGPLACWITGWFNIVGQWACTTSVDFSLAQFVQVIVLLATGGANGGGYLASKYVVLAIYCAILVLHGLINSLPIHWLAFFGQLGAFWNLGGVFVLTVLIPVVAKERASMEFMFTHCYTDDAVGIHSKVYVLAIGLLTSQYSLLGYDTSAHMSEETKNAEWSGPMGIVVSVALSSVFGWIYLVALTSAVTADDVPSLLDPTNDAGGNAIAQALYATFRRRFGSGAGGVLCLAAMAVAIFLCGVASVTSNSRMGYAFSRDGAMPLSQVWYRVNKQEVPFNVVWLSVSVAFVMALTSLGSQVAFQAMVSITTLGMYIAYALPIFFRVTAARNSFVPGPFHLGRRCSLVVGWVAVLWVALVTVLFCLPVAYPVAGVNFNYTPVAVGGVLVLSLGAWVLHARFWFRGPVTTIDA

SEQ ID NO: 69594 - protein, 406 aa, Zea Mays
MDDAGRAPPPAPAAVTVSATAAPAPTPPSATAAADKSSLDPDALYEEGMWQQMAMNSGATMQPGSYPERPGEPDCTYYLRTGLCRFGMSCRFNHPPDRNLYYLKTGTCKFGPTCKFHHPREKAGIAGRVQLNTLGYPLLPNEKECAYYLKTGQCKYANTCKFHHPELFNVVPSSRGSPIYTSVHSSASAGPQSYTGTMSSWTFPRASFIPSPRWQSPSNYAPMVVPHGLVQVPSWNSYPGQLQSPGAQQTYGSSQQGEASAGNQGMLSPYRSSSFPVPQYALQRDNVFPERPDEPECQYYMKTGDCKFGAVCKFHHPRVRSQPPPDCVLSPMGLPIRPGEELCKFYSRYGICKFGANCKFDHPTMAAPMGVYAYGFSGSASVAPASTNAPMTRHLLGSPSGSGYMS

SEQ ID NO: 69595 - protein, 744 aa, Zea Mays
METLELMEEKAIGMSKSIYRYVIRALSRGGYAKEALHWLALLGEKESTHATTPIFNIFLNACGRANLKDAENCLEILENLFLGKSEITYCELLKLAVLQGNLPAAYDIWKECSRYYSPSIVTQRRFIRALTALGDLQSAYHILQHMVALAAQSCDYLRVSSKRRYRSSRLDIPVPALNEFEDLNLPSCQGKLATGEHLVDAQPELFDEKTRPGNNLSYKVVVDASVANTLKSAPSTVKQILRWAFNDVLHACVPFNNCQLAEHLFTEMQKLGLQPTSYTYDGFIKTVIAGKGIAYANKVINAMERRGIEPYSDTLAALSEGHSNSLQLDLAEEFLERISEIKPKHIGSFNALLSGCAIMNEPERAVRILAKMKHVNMKPTLRTYELLFSLFGNVNVPYEQGDVLSHVDVSKRISIIEMDMFNNGIQHSFVSMKNLIRAFGAEGMIEEMLRYLNIAENTLWNINPHQKSDLYSTALHALVDVKETHRAVKMFKIMRSCSLPTNISIYNTMIECCKWLPCFKSASALLSLMLRDGFNPTVVTFTSLLKVVLENDNFEGALDLLDICKIEGLQPGIQTFNTVLLRAYARGQIHVLEYILECIHRSKIQPDPSTLWYTFCAYEEHELYNTAIESLLVLSMRMISEDAGIPSEKRIVFEDLILSEEPDAEFRIIRAFQAGEEFLATALLNLRWCATMGATVSWSPEESLWAMRLAASYDANKRPHINPSDAPKSWGRNPLNRPYWEANG

SEQ ID NO: 69596 - protein, 433 aa, Zea Mays
MEEAAAAAAAWASNAATPVPSEPMRSPPDAEASVDPTAVGDDEHDSKEVVLRRYFLQEWELVSAILHRVVAGGGVAESADVHRIRSIMDKYQEEGQLLEPYLENIVSPLMSLVRSKTMELGASTDELLDIIKPLCIIIYTLVTVCGYKSVIRFFPHQVSDLELAVALLEKCHTMSSATALRQESTGEMETKCVVLLWLYILVLIPFDISTVDTSIATADNVDGPEVVPLVTRILDICKDYLSSSGPMRRMSGLLLARLLTRPDMAKAFSSFMDWAHKMLLSVSDDFVDQFRSIGIVEALASIFKIGNRRALHDAVSGTWSDCSLVMKTNVSARSPLLRKFLVKLAQRVGLISLPPRLPSWQYKSISSSLGANLSSYTAGEVYSSGSREQVNIDQIGMCFLEEDMDVPEIAEEIIDLLLTGLRDSVCSYPYIML

SEQ ID NO: 69597 - protein, 463 aa, Zea Mays
MDRRSCRSRYQSSRYYKHFPFAPSPHLLQKLRGYEARHRRCAPGTPLYAKAVEQLRSGHSAEGGTECSYVVWLPFDGLGNRMLSMVSGFLYALLTGRVLLAALPPDSSDLFCEPFPGATWRLPAEDFPVANLFGVGQDMERSYTKLVDGMVAANATAGVAPSYVYLSLGWLLRDGLFFCGEHQLALRRVDWLLLYSDLYFAPSLYAVAEFQDELRRLFPEKESVHHLLSRYLLHPANPVWSMVTRYYRAYLAPAARRIGVQIRMFDHASIPADDMYGQILNCSRQEHVLPETDDVGEAAPSPTASSGGSKNPTTAIFVASLYADYYRRLTSRYSAAKGGGATRRVGVFQRTHEERQATESLAHNQRALAEIYLLSFCEELVTSGLSTFGYVSSGLAGIRPAILLTAFDHVVPETPCRRAASIEPCNLTPPRGVECLSRPADKDDLARHVRVCEDFKDGVKFFD

SEQ ID NO: 69598 - protein, 116 aa, Zea Mays
MIEFMEKVVIQLILWSSLEEHYLLLVACKNVFGIRSASWCILSSIEYMEEGCVNMDCVTLIEDYHNKIEFELNKIYDGILKLFASHLPPSLTVPKSKVFYLKMKGDYYRYLAEFET

SEQ ID NO: 69599 - protein, 359 aa, Zea Mays
MSWLNKIFKGSVNRVSRGHYDGDWHEGHSSDHTRDTYDDSDNEDIDRAIALSLAEEDHNKGKSVAIDTDYNLEEDEQLARALQESLNAESPPRQNVPIEDVPYVPANEPTPHVYPRGGSRICAGCQNPIGHGRFLSCMDSVWHPQCFRCFACNKPISEYEFAMHDDQPYHKSCYKEFFHPKCDVCNNFIPTNRDGLIEYRAHPFWMQKYCPSHEDDGTPRCCSCERMEPREIKYITLDDGRKLCLECLNSAVMDSPECQHLYMDIQEFFEGLNMKVEQQIPLLLVERQALNEALEAEKNGHHLPETRGLCLSEEQVVRTILKRPQIGPGNRILDMIIGPYKLSRRCEVTAILILYGLPR

SEQ ID NO: 69600 - protein, 172 aa, Zea Mays
MQKYWVDGRNANCFMLFPKGFSITWGSDARYWSWRKLTQEEKREIDPEEAKMEMEVAYLKDVCWLEIRAKLEMSHLTPGFTYVVDFVAKLEQNGYGWSEPVDLQINCPGDVDRKPRKESLWKTVDGKKWSYVNVGEVEAAGQNGEMEIAMLRLGGDWKRGLVLRCIKITPKP

SEQ ID NO: 69601 - protein, 258 aa, Zea Mays
MTDQERDDVPMLLRNVELPRFPLRSTSMCIPVRDDDYEEDTFVPHTGPLFVQPSTQTAPGISFTGRDTPDRLPKPSQGKQVSKPHAIMPEEIRGNKWSYSGQVPKNEHLMMSGPLGQCDNPDCVNCPPACKNRRHFQRGSNALDNKIHNILYGHSRGWKKKIEQIMACIPIMNPHAKPVQRWNQFFVISCLIAIFIDPLFFFLLSVRQDGNCIVLNWEIATALAVVRSVTDAIYFLHMLLQIGLCCTRVTSGGSWRLG

SEQ ID NO: 69602 - protein, 260 aa, Zea Mays
MRELREGCLYFRRAVPLCPWRERAAEWCCLRVEFKDAGGFEALVSGKTTEMQRIDVNERIVGLERLNPTPRPTTSPFLEGRWNFEWFGDSSPGAFAARLLFERSPTSVAHFMGLDVLIKDGYSKLSSNLKFLNTIQSKFLLTTQLSVEGPIRMKEEYVEGLIAIPRINEESLPEQLKGLLGQTAGALQQLPSPIREAVSEGLKLPLGGAFQRLFMISYLDEEILIVRDAAGAPDVLTRLEGPQPSPGDGTADAVISEYES

SEQ ID NO: 69603 - protein, 238 aa, Zea Mays
MSSRSFRLLLRTTPLSLAYLLYMLASMESVRGVNVPMYTTLRRTTVVFTMTMEYFLAKQKHTPPIIGSVALIVFGAFVAGARDLSFDARGYAIVFVANITTAVYLATINRIGKSSGLNSFGLMWCNGLVCGPSVLFLTYIQGDLKRTMEFPYLHSLGFQVVLLFSCILAFLLNYTIFWNTILNSALTQSMCGNLKDFFTVGIGWVLFGGLPFDLLNVIGQGLGFLGSGLYAYCKIRGK

SEQ ID NO: 69604 - protein, 106 aa, Zea Mays
MWWPLGPSAKLSSIDGRRDADPKEWMMPILELSTAKAPRSRNLVARASSSVMFSIRFSTSGGQSSICAWSILREMNHASAFCSELWILRSSSPQCPAIASVRRVSI

SEQ ID NO: 69605 - protein, 198 aa, Zea Mays
MSSSSVLLVSAVLVALVTLSSCRSLGELSEQKTYSSAPSYGGSPTPTYASGEGHEPTPTPSHHGTTPTPSYGTTPSTPAHGVPEIPKHGFVGSCDYWKSHPDMIIAVVGSLGNIGKTFGAACSLLVGKKLENLHDALSNTRTDGVGALLREGPGSSRRQMNTTTRTWISPYYTVSHNSYHLSFLPLLVFSCNITSKLC

SEQ ID NO: 69606 - protein, 1311 aa, Zea Mays
MKSDSNDVEMHNSENPKPNELEEGELPDSHAVSVGEHVDEVIGAAVADGKVTPRVQALIKILLKYQHTEDFRAIIFVERVVTALVLPKVFAELPSLGFIRCASLIGHNNNQEMRSCQMQDTITKFRDGRVTLLVATSVAEEGLDIRQCNVVIRFDLAKTVLAYIQSRGRARKPGSDYILMLERGNMSHEAFLRNARNSEETLRKEAIERTDLSHLDGTSMLSPVDISPDSMYQVESTGAVVSLNSAVGLVHFYCSQLPSDRYSILRPEFIMQKHEKPGGSTEYSCKLQLPCNAPFEKLEGPICSSIRLAQQAVCLAACKKLHEMGAFTDMLLPDRGSGEGEKTEQNDEGDPLPGTARHREFFPEGVAEILHGEWILSGRDGYQSSQFIKLYLYSVNCVNIGTSKDPFVTQLSNFALIFGNELDAEVLSTTMDLFVARTIITKASLVFRGPIEITESQLILLKSFHVRLMSIVLDVDVDPSTTPWDPAKAYLFVPVGAEKCMDLLREIDWTLVNSIVNSDAWNNPLQRARPDVYLGTNERTLGGDRREYGFGKLRHGTAFGQKAHPTYGIRGAIAEFDVVKASGLVPGRGWGHFNDYQNKGKLFMADSCWDAKDLAGMVVTAAHSGKRFYVDSICYNMNAENSFPRKEGYLGPLEYSSFADYYKQKYGVELVYKKQPLIRARGVSYCKNLLSPRFEHSEASNGEFSENLDKTYYVYLPPELCLVHPLPGSLVRGAQRLPSIMRRVESMLLAIQLKDIIGYPVPANKILEALTAASCQETFCYERAELLGDAYLKWVVSRFLFLKYPQKHEGQLTRMRQQMVSNMILYQYALNKNLQSYIQADRFAPSRWAAPGVLPVFDEETRDSEPSIFDEEFTPSSELQKNLYDDYDGDSMQEDGEIEGDSSCYRVLSSKTLADVVEALIGVYYVAGGKIATNHLMKWIGINAELDPQEIPSSKPYNIPESIIKSINFDTLEGALGIKFQNKGLLVEAITHASRPSSGVSCYQRLEFVGDAVLDHLITKHLFFTYTDLPPGRLTDLRAAAVNNENFARVAVKHKLHVHLRHGSSALETQIREFVKDVQEELSKPGFNSFGLGDCKAPKVLGDIFESIAGAIFLDSGCATSVVWKVFQPLLDPMVTPDTLPMHPVRELQERCQQQAEGLEYKASRTGNVATVEVLVDGIQIGVAQNPQKKMAQKLAARNALVVLKEKETAAKKDTEKDGEKKNGSQFTRQTLNDICLRRQWPMPQYRCINEGGPAHAKRFVYAVRVNTSDSGWTDECIGEPMPSVKKAKDSAAVLLLELLNRNYRGKPDGK

SEQ ID NO: 69607 - protein, 517 aa, Zea Mays
MPSTSGPVAVASASASAKAAPSPDVGISPDLYPSEDDLAYEEEILREPFKLKGWWRYLVARAAAPFAKRAVIYERALKALPGSYKLWHAYLRDRLDHARPHPIDHPAYSSLNNTFERALATMHKMPRVWVLYLTSLLDQRLLTRARRAFDRALRALPVTQHDRIWPLYLRLASLPACPVETSLRVFRRYLQFDPSHAEDFINFLVSTNHWQEAANRLASVLNDDGFRSVKGKTRHQLWLELCDILTKHADEVAGLKVDAILRGGIRKFTDEVGKLWTSLADYYVRRGLFEKARDVFEEGVSSVVTVKEFSVVFEAYTQFEQSMLAAKLEAAEEEGAEDVNEGGGKKSGIDNLSKKFLDGFWLNDEDDTDLRMARFERLLDRRPELLSSVLLRQNPHNVEEWHRRVKLFEKDPARQVATYVEAVKTVDPMKAVGKPHTLWVAFAKMYEKHNRLDSAEDIFKRATQVNYKAVDHLASIWCEWAEMELRHNNFDKAIELMRQATAEPSVELLLRGMSLSK

SEQ ID NO: 69608 - protein, 389 aa, Zea Mays
MGFWVGLVLGVAAGLALIVGFVRCENSRSARRRQLAATVASFSRMTIEDSRKLLPADLYPSWVVFSSQQKLKWLNQELTKIWPFVNDAASELIKTSVEPVLEQYRPIIIASLKFSKLTLGTVAPQFTGISIIENTKESGIVMELEMNWDANPSIILAVKTRLGVALPIQVKDIGFTGVFRLIFKPLIEELPCFGAVCFSLRQKKKLDFRLKVIGGEISAVPGISDALEDTIKNAIEDSITWPVRKVIPIIPGDYSDLELKPVGTLEVKLVQARDLTNKDLIGKSDPFAIVYVRPLPDKMKRSKTINNDLNPIWNEHFEFTVEDADTQSVTVKIYDDDGIQESELIGCAQVRLKDLQPGKVKDVWLKLVKDLEIQRDRKDRGQGCCHRRT

SEQ ID NO: 69609 - protein, 292 aa, Zea Mays
MLSSLHPRRLFLHYLDMLQMICLFSLITQTIFIRLMRPQFYYDSVSIFFYNVLHPPQFPSTCTHKLDKYYNLGAFKGAAGTNESLLYEIINGLRAAGTDAGSSSAATASFTNATKSVVELLTERVNQLSVKNDNDLVSQSLPALPLLLEIFNSTRVQDFLLDENHNLTEMDGNTGECHLEDKSNRQTDECCSYTSSNRESWGRCSSLGGASDGLSSGEQPEIPNHKLKSLTLRALATPLRRVQRKPLAIPKEKNRSLWKRLKKERQQMGENISQRLRLCLQGQARHKRTKSS

SEQ ID NO: 69610 - protein, 483 aa, Zea Mays
MQLQRSVDRPVHPSMVSGGSIKEQQHEMNISFAMVNHHHHHQQPPSSSSSSSMHAAAASFMSGKEASSGAYAYDHLGELDQALFMYLDHGRSHGGTPQQEQRQTLNIFPMHVEPSPKGEISLVLPPAPVGYKQPRSPDHHHHQHAAMEELLAESRRQQEHQPFAAAAEPAAAPGMIKGVKPLAKKDHRRGTSTTERDPKAYIQQLESSRIRLAQLEQELHTTRAHQGVFFPNGGILAGQSVVGKGVPIGGIDSLSSEAAMFDVEYGRWQEEHYRLMYELRAALQQHLPEGELQMYVESCLAHHDEMLGIKEGAIKGDVFHLISGVWRSPAERCFLWLGGFRPSEVIKMLLSHVDPLTEQQIVAVYGLQQSALETEETLSQGMEALYQSLSDTILSDALSCPSNVAIYMGQMAAAMNKLSTLKGFVRQAENLRQQTLHRLHQILTARQMARSLLAMSDYFHRLRTLSSLWVTRPRAPQEQQGHS

SEQ ID NO: 69611 - protein, 224 aa, Zea Mays
MHRGLHTCLLEHKVNNAGFVGLEYIQDRIDGTSTTSEERLELLLKWCLRETCDAGKECMRINYHGTKQVTRALLPLLLASDSGRIVNVSSVLGQLRFFGSEALKRELDDVASLTEERLDEVAGAFVADLEAGAVEARGWWPAGFSPAYMVSKAALNAYSRVLARRHPALRVNCVHPGFVRTDMTVNFGMLTPEEGGSRVVAVALLPDGGPTGAYFQERQQAPFV

SEQ ID NO: 69612 - protein, 546 aa, Zea Mays
MSFGLTNAPAHFMYLMNSVFMPKLNKFVVVFIDDILIYSKSKEEHAYHLRIVLTWLREHQLYAKFSKCEFWLNKVQFLGHVLSAEGVVVDPSKVKDILDWKPPTIVHQVRSSLGMAGYYRRFILDFSRIAKPITELLKNHVKFVWSPECDKAFEKLKELLITSPVLAQPDIAKPFHVYCDASGIGIGCVVMQEGRVIAYASRQLKRHEANYPTHDIEVAAVVHALKIWRHYLLGNTCHIYTDHKSQKHIFTQSKLNMRQRRWLELIKDYDLEVHYHPGNANVVADALSRKSQCNCLSAKPLIVTLCQEMERLNLEIVHQGTIANLILESTIQSQIVDAQNVNKGIAHIKERVVAGMATCFRIDENGVLWFQNHLVVPKVPELRQQILDEAHLSRYSIHPGSNKMYQDLKQRFWWTKMKIEIALYVAKCDICQRVKVVHLKSAGRLQPLPIPAWKWEDISMDFIVGLPKTSSGYDSIWVIVDLLTKSAHFIPAKSNCPVLTCAQLYIARVVSLHGVPKTIVSDRGPQFVSKFWEELHKSLGTKLIHS

SEQ ID NO: 69613 - protein, 151 aa, Zea Mays
MLAAAAAMAVTVPRAASHCFPANTARKCRTCWSCRAARVEAGHSRLEVRKVTYRPPGTEQNLLNEINLSLQEKSFGLIFGRSGSGKTTLLQLLAGLSEPTSGSICIQKYDDTGNPIGLPELLTSQRVGIVFQFPERFKLLICCCLMSHLLV

SEQ ID NO: 69614 - protein, 481 aa, Zea Mays
MLKDAAAVARALRRELASGGADSGVRVFVMADTAYNSCCVDEVGASHIDAQCVVHYGHACMSPTSNLPAFFVFGKAPLDVHACAGTLLECSRKSNKRILVLYGLEYAYALDDLRQTFMESCKSNSGNHEVQYAEVLCSVMSPSSSTTEENKIPQSSGPSCNGDISRNSESATFLNNRNGMECSSSTQKYSLAGMTWNISVEEKMEDYFIFWIGQDSSAFANIVLTFNKCEIVRYDAIENQLTADVSHLMKILRRRYYLVEKAKDANIIGILVGTLGVAGYLHIIEQMKDLIKAAGKKSYTLVMGRPNSAKLANFPECEVFIYVSCAQTALLDSKDFLAPVITPFEAVLAFGRGREWTGEYLLDFKDLITSEKQEAASTTGEARFSFIKGVYVEDNCPQENEEQSETSLALAEVTEKALSIQNQHNDAVLYQGRAMSSIDYLKARSYRGLTGEYEGPVPDSVLVGRMGRAAGYSDEKTESAQ

SEQ ID NO: 69615 - protein, 386 aa, Zea Mays
MPSSIPPPPQNFLPLPSPGVGQSTRINLGEIKLKLVKRIGLERAKRYFEHLQRFLSLKLSKSLFDKFCLTILGDDNIQLHNHLVCSILHNACQASGPSTVSTPKSIGVAKNSNHVLSPTVPFSDIGDVLHHHVKDHYPRSRNAHVVQENGVVRLSKLKRFPQPHSELVELLSKRSRVENAYSNLSDPINSNCPGVSGREYVEAVAQHARGPIIAPLGVAFCSGHFGGNSKTLTLPSGASSDDSICCYDLGQLCDTSSLRQRMGRIAETEGLDAVSLECANSLNNGVDFYLKYLIGSCIELVRARSQHDRINHMALKQQLSQKLINGVQLQNQVHGQSATTCPQISSVSLQDFKALSETIPQLLGVNASLLKCFFLFHLYCLAKSKP

SEQ ID NO: 69616 - protein, 566 aa, Zea Mays
MSPFEHGEVFVLDDGGEVDLDLGNYERFLDIKLTRDNNITTGKIFQAVINKERRGDYLGKTVQVVPHITDEIQDWIERVAVVPVDGKEGPPDVCVIELGGTIGDIESMPFIEALGQFSYRVGPGNFCLVHVSLVPVLNVVGEQKTKPTQHSVRGLRGLGLAPDVLACRSTEPLEEHVKAKLSQFCHVPDQKAHEAILKVLDLQYDGKVPREPELTKWTKRATKFDKLKTPVKIAMVGKYTGLSDSYLSVIKALLHASVAMERKLVVEWVPSCDLEDSSAKETPEAHKKAWKLLKSVSRNSIPSQGADGVLVPGGFGDRGVQGKILAAKYARENNVPYLGICLGMQIAVIEFARSVMKLRGANSTEFDPATTSPCVIFMPEGSKTQMGATMRLGSRRTYFHVSGCKSAKLYGNASSVDERHRHRYEVNPDMVPDFEKAGLQFVGKDESGKRMGIVELPSHKFFIGAQFHPEFKSRPGKPSPLFLGLIAAASGQLEPLLQRSNPTTKACSISKVPKLKLYPTGPVNNPLNSLVNGYYPNEKRRLRFSKPPAPATHGSDIFNEERLPVR

SEQ ID NO: 69617 - protein, 306 aa, Zea Mays
MASLQQRKQRKDESGGAHAVADEAVRGTGKGKSEAAPGRRKVTYGFHLVEGRMPHGMEDRHVAEFRKLDDGNEVGLFAVFDGHSGADVATYLREHLFDNILMDQSGSDFWTDPTEAIRRAYHRTDRKLLKKTAGDDSGEGMKKGRRRGGSTAVTAILINGEDLVVANVGDSRAVLCDAGGRARQLSVDHEPLRERRAIEARGGFVTEIHGDVPRVDAQLAMARAFGDRSLKEHISSDPDVAIEDVGDGAELLVLASDGLWKVMSNQEAVDEARGIEDARKAAVRLVDEAVRRGSKDDISCIVVRLH

SEQ ID NO: 69618 - protein, 267 aa, Zea Mays
MTGGGEEQGRSLFGVSLTNRPRWQQFMICSSGFFFGYLVNGICEVLPVMVMGAFIPGLRRKYAFQEYVSAVMLVVGLILFTLADAQTSPNFSMAGVAMVSGALVMDAFLGNLQEAIFKMNPDTTQMEMLFCSTVVGLPFLAVPMVLTGELVTAWTSCSQHLYVYAVLVLEAMATFVGQVSVLSLIALFGAATTAMVTTARKAVTLLLSYLIFTKPLTEQHATGLLLITMGIVIKLLPENKERRPRRLPKNDDDDKPRESREAGEETA

SEQ ID NO: 69619 - protein, 301 aa, Zea Mays
MACGDGAEEKFREPLRLASDTTPGAADFLNPMRPTPALVAGGRMVTSFLSATEWMLPSPATQVHTISVLPSRRDFAFSNLTMLLRNSGGNEGESGSTKFHVVRDDLLHPLANGNKARKLDALLPILRRCGVTDIVTCGGCQSAHAAAIAVHCAEWGIRPHILLRGEQLDVPTGYNLISLMFGNVTYVSRSLYAQRDEMLYEHAIKVAGYSGTVMWADEVIGKGLGVDEDTTDGNGSRRVMIVKEGAGSVQALLDSSGGLLLLCLLTHLKDINSERDLFYLILRRFSRKSTMEWWKMLLMTI

SEQ ID NO: 69620 - protein, 349 aa, Zea Mays
MDAKKPYMLAITTVAIYTGMYVVSKAAFNQGMNSFVFVFYRQAAASLLLLPIALVLERNTLGMNLCNASVTLTSATVASATGNSTPVITFCLALLLRMEVVKLRSVSGIAKVTGVALCLAGALVIALYTGPSLSPVNRHHRASGGAHGFKAPTRGGTWVTGTFLMLLSNVTWSLWTVLQGALLKEYPNKLLVTTSQCLFSTAQSFVVAAVAERDFSKWALKLDVSLIAVAYTGFLVTGVSYYLQAWCVQIKGPVFLAVWNPLCFVLTIFCSSFFLGENVHLGSIVGGILLVCGLYSVLWGKTLEVHQTVESGDNTVGEVQNGQEEKNHQQKVLEKGRQEEASMTAPGVV

SEQ ID NO: 69621 - protein, 655 aa, Zea Mays
MPSPMARIFHRHLLLAVVTLAVAASLLRPAAAVRPFVLVLSGEDFLKDPAAHPSLPSADSDDDDGWDDFADDSPAADPLLSPSSWAPLLDPTISLPSGDETDSPADALFVAGTRAMLSAASDGDDAAFTTAAAQIEASAEAGHPGAQSALAFLTGAGMTRPASRSLAFLLHKFAADAGDLQSKMALAYSYFRQEMYEEAVILYAELAEAALTSSLISKEPPVIEPIRLHSGTEENKEALRKSRGEDDEDFQITEYQAQRGNAANMYKLGLLYYYGLRGLRRDYGKAFHWFSKAVEKGETRALELLGEIYARGAGVERNYTEAYKWLALAAKQQHYSAYNGLGYLYVKGYGVEKKNLTKARELFELAAENKEAGGHYNLVNAGQPKAIYQVAKLFQKGIGLKRNLHMATMLYKSIAERGPWSSLSRWALESYLKGDVGKALLLYSRMADLGYEVAQSNAAWILDRYSDQSICMGESSFCTDMERHLRAHALWWHASEQGNEHAALLIGDAYYYGRGVARDYERAAEAYMHARSQSNAQAIFNLGYMHEHGHGLPLDLHLAKRYYDQAVEVDSAAKLPVMLALTSLWLRTNYADSFLVGFIDSLPEMYPVVKEWVEDVLMDEGNATILTLFACLVTVLYLRERQRRQVAAAANPLTT

SEQ ID NO: 69622 - protein, 85 aa, Zea Mays
MRKFVAKVARPEQLRHSSSTACRPCRGVANMCRIEVQHLMLQVVIHSSFSSPSMAFVSIAALCGPTSPPPAKLAGINRYDQLVEV

SEQ ID NO: 69623 - protein, 105 aa, Zea Mays
MGKPPWKGPQLAGAGARPASLAGGAGNWAREDAAGGRNTACLREKRAGRNTERHGKAVGGRGRRRGGAEKELSDLGELGEQRARRGRGALTASLEQGARDAGEAR

SEQ ID NO: 69624 - protein, 339 aa, Zea Mays
MGLDVMEIGMGADLSLDLRHFASKAVRQSKDDTPAPDMDACIRRLEEERGKIEMFKRDLPLCARLLADVIDVMKEEAGKKKTTTRRRSDRRLASAAADDEEEEADGATADKSKWMSTAQLWTGDSGREDAESEKQDKGRCSPEARSRGALLPFKADVGSGAPAFAPLFLRTDDKAAAARVGVPDLSSLLSPPATMPPADAGAEESRRQKETLSSFMLRHACSCHAEANQGADEGGWADKRRSEKPSSEIPAAQPQGAWIRRGAPADRARGRAVDSPGARQPSVWISPRPPPPPVHLGGRRLVRRHRQLRGGRRPVRELWLEMMKRLLLLLLRHQCVFTV

SEQ ID NO: 69625 - protein, 99 aa, Zea Mays
MAGWEAIRGNPRCQLPSLAAWRRDASGCIGEGIRRLSSSRRRLTASTTFLGPLQMRRAARSRIAWSADRENLAGGKRLVGPFARRPPASSGFWPARITN

SEQ ID NO: 69626 - protein, 956 aa, Zea Mays
MDDSVPFNDLGPSKPPSASFYDDMFESYFNRAAEAPEPAPKASSSPSTPPPVFDKPVFDDDPYTADPFDAIPLFGGGGGGEEEDLHGGVRSAAKPERTELEVVGFDEDLFPGLAGSTNFPMEKPAREVERDRQPVGFDDELIPGFDGSMKPAPQMEPETVAFDDDVIPDCSGGTSYPSSAREEPITRQESESISSSKISMSMPEDPFVTLGGTHKSGYSSLGLFSNLLNNIGMPRKEADTTPDNTSGIFQGSDIFTEFPKAMPPFSFTSENQSDRTERRYTENIISTSHSDRLPQEKTVQQASTEAPANTLTEMNFPEASVVHEVPVTTSFQTLNPFVEEDDLLEVNQSSQTTNDVWLTVLDIALVTLPTSAPPPSRPPPPLAAKKPPTESVTSEAYAHHCNQRYHHSICSSNTSKTSQIDELEDFFLTKPANSAIGHPQVLKHEGNGHYPSAATASFMDWTEMGHCKRGNQGAFDSMFTSSQYRQPEIDEKAEVCAHETESTDEEKRLENEQIQREHKEEQIRAEREMEEELERERENVRQREQEEQRRREKERVARQAVDKAIREARERSAAEARMQAEKEARQRAERAAVWKAATEARERAAVEAKERAAKAAAEAKEREAAEARERAATESRERDAKVAADARERAARAAAEAREKETAEFQEKATAEARAKAERAAVEKAAAEARWRAERAAFERVATEVKQRAFNDARERAAAAAAAEALARENQQRRATTEPDLESFFGMPSRSSSLPRSYNNTTTNPFDVQPGNAGSGGVRRTPSGSGFPFTQPSSSNLMDGLSSIFGAPLPSAVFQEVDGESEERRKARLERHQRTMERAAKALAEKNERDLQAQQEQEERHRIGESLDFEIKRWAAGKEGNLRALLTTLQYILWPECGWRPVSLTDLITAASVKKEYRKATLCIHPDKVQQKGANLQQKYIAEKEAWKKFNSEELF

SEQ ID NO: 69627 - protein, 85 aa, Zea Mays
MGQGSGWRQPSHRHELKHSSSCQQKIKQFPSCVLLIKMDPLHLASLHPGFPNSSVALKAPILYYAEYCQNQTRVIPPDHHLLPRP

SEQ ID NO: 69628 - protein, 134 aa, Zea Mays
MLVGRLKLRAASTRQVAALALAAKERPLSRSEDNIFVFPLLADGCNTHCRRFARAPAHRTLQCFHLPSSCAGAERSLLHLGAATEESMVPVARPAPIAAPRRSSGRADGRGLQVCAVERGRSHVRPTGATAHRI

SEQ ID NO: 69629 - protein, 126 aa, Zea Mays
MLPTRAAARNPLAQSRWDSAPCWKGSPSALGTLRGRWPVMELTTVTVETSSLKAGTLLVVGTRIQVHLPSSNAVTALLDHLCRQTEGGRRGCRTVNSSTRGTVPLASSPGSDPLPPPRKGEVLPEG

SEQ ID NO: 69630 - protein, 586 aa, Zea Mays
MLVRHVFPEFSSRVGHLRAKAAWVAGQYAHINFSDPNNFRQAMHCIVSGMHDPDLPVRVDSVFALRSFVEACKDLNEIRPILPQLLDEFFKLMNEVENEDLVFTLETIVDKFGEEMAPYALGLCQNLAAAFWRCMASSEADDEADDSGALAAVGCLRAISTILESISSLPHLFTQIEPTLLPIMRRMLTSDGQDVYEEVLEIVSYMSFYSPTISLDMWTLWPVMMEALNDWAIDFFENILVPLDNYISRGTDHFLACKDPDYQQSLWKALQSIMMDENMEDSDIEPAPKLIEVVFQNCKGNVDHWVEHYLRITIERLRRAHKPYLKCLLVQVIANALYYNPALTLEILNKLGVAADIFNHWFAMLRQVKKSGARVNFKREHDKKVCCLGLTSLIALPAAKIPADALDRIFKATLELLVAYKDQVAGGVIHVFSCACVFFPGEYTEAKKQNEEAADDMDGFDADEEDDDEVDSDKEMGLDDEDGDEVSSLQLQKLAAEARGFQPADDDDSDDDFSDDELHSPIDEVDPFIFFVETVQGLQASDPARFQNLMHTLDFSYQALASGIAQHAEQRKNEIEKEKSEKANAQ

SEQ ID NO: 69631 - protein, 242 aa, Zea Mays
MSAAEPEAHAASDGFDRRRRELQAFDDTKAGVKGLVDAGVTAITAIFRHRPAGVPGGDDLVPAAVPHRRGRRHHPGHRPRGCAATRGGRAGEARGRDRGVLPGGQPRRAAGAHGRRARRGEAVQRAAGGGEAPLLHQGHRAQGEVHLQLRPLPVGGRQLARHPLLRAGARPAAPGRAARGCQGRDAGVRRRGDGAGAAGVGAPVGVPRPAQRPPARDGLRAEPQRGEPLLPAVPGAAPHPRH

SEQ ID NO: 69632 - protein, 101 aa, Zea Mays
MNSQKQAVMVLLLAVACKLHRHLARRLQMDASCFSSNSLMYIACNLETIYVPMYLSGSIFKSLATPGFHESRLDHYNVYLLASDIVLLFPHFFICHILVQK

SEQ ID NO: 69633 - protein, 594 aa, Zea Mays
MEMRARESVSMSKDLTGEITPFATALHDVFLHSHCSSCFTKLLPQTPCVMSCMTCCSLRYCCSECLRADSVVHVSSGECCFFVDHLKRASPSYVTEGTSDLRAALRLLCVLEIHGLVSPDSINHYSRIGGLSASGIEEALKEGEVIAERILEGSLLMSSARKSRAQTCVIFSDRLKLEKMALWAVIINSVEVQLSEGLALGVAVYGPSFSWFNHSCFPSASYRFVLAPRNEDCASQKSKSSVVPASKGVAADVWHAWQYEDHSTHGTSLRSTRCIASPEPYTDLILNCDVRDLDKAEAEGTVTPPAIENLGDVLQQAISEYTSNDDPEACCDMIETMLSNRLVSGLKQEDISGRKHILQPLHHICLTAYMTLASAYRFRALSLEEAVRSDGENTDEFFRMAKAAAAYSLVLAGSTHHLFLSECSLMIPLSHFLLNTGQSLLYLVESIKGKTRQNISEARLSFSSCPASSTDNDSPPYHVFRSTCEAFGKQMLSLSLRCWSFLVRGLPCLEKIKSPMEFSMPGTTIFQSVLSEEDHANLSAHEPVGFTERQAGCILSLALCCITYCKYLATICYGPHHYLADHAKYLLEGIDPAQ

SEQ ID NO: 69634 - protein, 916 aa, Zea Mays
MKLGGQSPKRMRDLSSLWVPPVYRRLLSADKAERDMVERCLIKVSCVILPPQPLLSKAVASDLEQKLLSCMVNMLDDPSKKVQTVKSWGWIVSLLGPDAVNNRPLLNKLIKVPEQMFTDLNPQVQVATMVSWKSLVDAFFPSQATEIVAQQTVISPLKPIEQASAQVKRIRLIMVPICRVLSRSRNIVLSSSCLSTWHYLLHRLGNLINYLPILEAAFGPILKIIFSFGINDQNKPLWSFCLNLFLDFVSSKNRVREDLCAPVNQNLLAQSCKHIKALLDIQHIKWLPWDISCFNFQLNILGIILKPELFQDIIPETMVIVMDSATEIFRFLLKGIQIELREQRAYEQVNECITNACKFAKRLLLDHVGKNSVIKCAALLEFGLRFMKVIAKELDHSLLASENIEVCLDIEHIKENQHAECSPKLSLPRIRSLSYMEMVSPAVYVTALSLSMISQYTGEFSHRDADELVSILDPSSDALENFHTAVSFMYMQIRRPTCNKERLKWLMVWNSFAKKMNSQIISYLETNSGLCYHDVLHQFFCYPILNFLYPKGISILLNAENSSESKFSVLQNLEMESTIEVYRSLSTNSCNSKFFSKVFFDGFYKYLVCTIDENMALFQANLEHLSEEFENASVLSALGEIVIGLLQNDQMLTYANQELKETPEDSSVCRQPELFLNCFKLANRFMKLSSFHFKANPAGQHQVTSRFFSSLSNFAGHLTLKEDVLLFEIIGDQLTEWLSLSIILYSEMQQGQIVVHLENLWLKMVECLKRSQLVSDVPLINQKHRLLQAALNRPHRPISVATASVCRVATHGNTTLHPGCLISEFAELLMHRRKALDSSRKTVITSNPTDLTAERYDGSVNVSVGLGRKRLKIMKYSTKPKELNKNRANMGISPGNTENRACRKPELILEMLQRKT

SEQ ID NO: 69635 - protein, 312 aa, Zea Mays
MMPQQQQPGMAPPPPQAAPGAPPHWGGIPPPMAPQHQYAPQMWGQAPPPPPPPQAAYGQAPPPPQAAYGQALPPPQAAYGQAPPPPQAAYYGAVPAPAAVAAAPVGPSEVRTLWIGDLQYWMDDNYIYGCFASTGEVQNVKLIRDKHTGQLQGYGFIEFISRAAAERVLQTYNGTMMPNVELPFRLNWASAGEKRDDTPDYTIFVGDLAADVTDYVLQETFRAHYPSVKGAKVVTDKLTMRTKGYGFVKFGDPNEQARAMTEMNGMLCSSRPMRIGPAANKKATVVQEKGYQQALHIGLELRCVSCVMHDLC

SEQ ID NO: 69636 - protein, 567 aa, Zea Mays
MAGDSSPSPASAPVQVRCAGCRSILAVGLGVTEFICPKCRMAQRLPPQLMAKSTSPSSPLPKAPSKPSLPPTQPRMGAPSAQGVDPTKIQLPCAGCQAVLNVPHGLARFRCPQCGVDLAVDHAKLQNFLAASNSATSSGHAPTSVRTQPPLATFLSVLPLQLVPGATISMVLPAAEPHEEINEVAIDVERDEDEGGTVGETFTDYRPSKLSLGLSHPDPVVETSSLSAVQPPEPTYCLNIMDELDETNALSCLQIETIVYACQRHLHHLPTGHRAGFFIGDGAGVGKGRTIAGLIWENWQQGRHKAVWVSVGSDLKYDARRDLDDVGAKCVQVHPLNKLPYSKLDSKAIGIKNGVIFVTYSSLIASSERGRSRLQQLVQWCGQEFDGLLVFDECHKAKNLIPDAGSQPTRTGKTVLEIQEKLHEARVVYCSATGASEPRNLGYMVRLGLWGEGTSFQTFPQFLGALEKGGVGALELVAMDMKARGMYVCRTLSYKGADFYIVEAPLEERMMNMYRRAAEFWAELRLELLSASELFADGNSNQIWRLYWASHQAHVHVCKGTCCCEVS

SEQ ID NO: 69637 - protein, 112 aa, Zea Mays
MDGRMDQHREGGEGGGITTDGPGRPPRRMERRARRHAAVDREMPKRGHHHLVVQGRRRRGRGGSAPCRCCAGWLPRPCMVAWLGRRDETASTCGGGLRLRREPGPGRQATWS

SEQ ID NO: 69638 - protein, 308 aa, Zea Mays
MFSGTGPSGGAAHSTSTGGGGGSPSDRGGPAPSASASVSTPASESTVARRLNGLDPHGDDAPSSQPATSKKKKRGARAVGPDKNGRGLRQFSMRVCEKVESKGRTTYNEVADELVAEFSDPNINIDSPDPDNSSAQQYDEKNIRRRVYDALNVLMAMEIISKDKKEIQWRGLPKTSMNDIEELKTEVNGLKGRIDKKNAYLQDLQDQTRPHATVEVEISEDMQHVHFDFNSTPFELQDDSFVLKAMALSGEEADCTQAPGANGGECSSTRNNYWHHHQQPQPPGPRVVRVPNSPPIPGILKGRVKHEH

SEQ ID NO: 69639 - protein, 360 aa, Zea Mays
MEPGLASRVARSAAQPLSGCLSRHSLSPWLKIQNHIYPMPSLCHKVPSTGKCHASMTTSYIRETSDVTDLDWENLGFGLIETDFMYVAKCGTDGIFSKGEVLPFGPIALSPSAGVLNYGQGLFEGLKAYRKTDGSILLFRPEENAIRMLSGAERMCMPAPTVEQFVDAVKQTVLANKRWEGLSPINLIVEDKFHRASPGGTGGVKTIGNYASVLKAQKIAKGKGYSDVLYLDAVHDKYLEEVSSCNIFVVKDNVISTPAIKGTILPGITRKSIIEVAQSKGFKVEERLVCVDELINADEVFCTGTAVVVSPVGSVTYMGKRVEYGNQGVGVVSQQLYKSLTSLQMGNVEDWMGWTMQLNQ

SEQ ID NO: 69640 - protein, 405 aa, Zea Mays
MSASEFRIPYQQVSPSQPAENVNQFKTCRCGEGDPNSTSETGDSPPASCPNCQVLKSGHLLLSSKGIGWTSWKKRWFVLTRASLVFFRSDPNVPPPRGAEPIVTLGGIDLNNSGSVVIKEERKLLTVFFPDGHGERTFTLKAETTGDLNEWRNALESAIAQAPSIANTMGQNPIFSTDVEAESAESPAEHSEDRSVIGRPAKFALVDADGSPSFLEKALKFIEDHGKNEFSPEEDAHVIGDCIKYVLREMPSSPVPASCCTALVKAYRSDKARRLDEINRVINEVFPEPNRQLLQRTRKKVPVLQMLIRSLRMMLTRNIPQIMTPMMTMVLMILVKMTLKKIWTTLMTVNMTVRSTLISRMARLKTISQKLQKLHRQRIPLLWISIVNPTRSKNHVDRMDPKIVY

SEQ ID NO: 69641 - protein, 630 aa, Zea Mays
MIHPLVLSLPFPAIISRPRRHRHHTTTPSLPSHSRSLHHYRLLRFTPLVASCGDRRRIVRGASATMGLFTVTKKVTVFQQPHYLQNFVQSTFNALPADQVKGATIVVSGDGRYFSKDAVQIITKMAAANGVRRVWVGQNSLMSTPAVSAVIRERIGADGSKATGAFILTASHNPGGPTEDFGIKYNMGNGGPAPESVTDKIFSNTTTISEYLISEDLPDVDISVVGVTSFSGPEGPFDVDVFDSSVNYIKLMKTIFDFEAIKKLLTSPKFTFCYDALHGVAGAYAKHIFVEELGADESSLLNCVPKEDFGGGHPDPNLTYAKELVERMGLGKSSSNVEPPEFGAAADGDADRNMILGKRFFVTPSDSVAIIAANAVQSIPYFASGLKGVARSMPTSAALDVVAKNLNLKFFEVPTGWKFFGNLMDAGMCSICGEESFGTGSDHIREKDGIWAVLAWLSIIAFKNKDNLGGDKLVTVEDIVRQHWATYGRHYYTRYDYENVDAGAAKELMANLVSMQSSLSDVNKLIKEIRSDVSEVVAADEFEYKDPVDGSVSKHQGIRYLFGDGSRLVFRLSGTGSVGATIRVYIEQYEKDSSKTGRDSQEALAPLVDVALKLSKMQEYTGRSAPTVIT

SEQ ID NO: 69642 - protein, 895 aa, Zea Mays
MPELNNSFIWIPDSMAAKMAGAVQVLKDDTVKRTPMARPSNGREGKPIRLLSNHFSVKLRGVDAVFYQYSVCIKSEDDKVVDSKGIGRKVIDKLLQTYCSELDGKDFAYDGEKCLFTVGPLPQNNFEFTVILEETSSRAAGGSPVHESPTQANKKRVKRSHLAKKFSVDISYAAKIPLQSVALALRGSESEHGQDVLRVLDVVLRQQQAKRGCLLVRQSFFSDDSRNLVDLTGGVSGCRGLHSSFRTTIGGLSLNMDVSTTMVVTPGPVIDFLVTNQNVRDIRDIDWPRAKKMLKNLRVKAKHNNMEFKIIGLSDQPCSRQMFPMKVRNGNIEIKSVDITVQDYFKSKQVELTMPYLPCLDVGKPKRPNYLPIELCHMVSLQRYTKALSSQQRAMLVEKSRQKPQERMRVVTDAVKSNMYDDDPILSSCGIEIEKQLTRVDARVLSAPALVVGNSEDCIPNRGRWNYNNKRLFDPVKIERWAIVNFSARCDMSRISRELINCGRSKGIFIECPHSLVDEDSQSRRCSPVERVEKMFEKVKASLPGPPEFLLCLLPERKNCDIYGPWKKKNLHEMGIVTQCIAPSNKMNDQYFTNVLLKINAKLGGMNSKLALEHRQMIPVVTQIPTLILGMDVSHGSPGRADIPSIAAVVGSRCWPLISRYRASVRTQSPKVEMIDSLFKPLDDGKDDGIMRELLLDFYQTSQQRKPKQIIIFRDGVSESQFSQVLNVELNQIIKAYQSMGQGDLPKFTVIIAQKNHHTKLFQADSPENVPPGTVVDSGIVHPRQYDFYMCAHAGPIGTSRPTHYHVLLDEIGFSADNLQKLVLSLSYVYQRSTTAISVVAPICYAHLAAAQMGQFMKFEEFADTSSGSVNSSSPPSIPELPRLHADVCSSMFFC

SEQ ID NO: 69643 - protein, 261 aa, Zea Mays
MAMTEGLVPITRTYLARYYDKYPLPPLPDATTDLAARLRALSADLAAVAPIAPDEELLEQEAAGIPAHKIDENLWKNREQMEEILFLINTSHRPVALQQKSTPEDAEIVCTLDDIEAKLKDMLKNLEQFQLKNADNVFNTVMTYMPQDFRGTLIRQQRERSERNKQAEVDALVSAGGSIHDRYALLWKQQMERRVQLAQLGSATGVYKTLVRYLVGVPQAYGRTKRTLWSSPLHPYKTGACNSVVFACLFGTIWTKENREG

SEQ ID NO: 69644 - protein, 1368 aa, Zea Mays
MSMDGPATSPASEVPFRISFSGHSGHLRLDPTPHTPSPIPDFVLPPAYPAESPSSVKEYLERNYLDPELHLPTAADSGRVWDVDWFALARPPLEPSAPRTMLAPVWVPPFRRGQEKLQSAAESRVWDPESVQMEMVDVFDSGTGGIAPRMPGPAKDFVRGSINNRPFRPGGLQDDAAEAAALEKAFPEGARTGDWVRELMSGGPAQVAPPGFRKGLELGQLKGYESHWKCFRDGELVEEQPASSSNDTMEKYSVQFDDLFKIAWEEDTANKLLKDGVVQQSAEEIGEQKVDALQDEFESITTLDDEKQEVDVIRNVPETQTDLDQMLSSEVQDTGREPGASGDKKPTQDGMVWALVGGDEDIVTNFSKLVPDMAIEFPFELDKFQKEAIYYLEKGESVFVAAHTSAGKTVVAEYAFALATKHCTRSVYTAPIKTISNQKYRDFSGKFDVGLLTGDVSIRPEATCLIMTTEILRSMLYRGADIIRDIEWVIFDEVHYVNDAERGVVWEEVIIMLPKHINIVLLSATVPNTVEFADWIGRTKQKKIRVTSTNKRPVPLEHCLFYSGEVYKICERDMFLAQGFKEAKDAFKKKNLNKFGVKPGSKSGTPAVRAGTQGKNPDTSNKGRDQKYPKHRNSNSGVATVQQSSSGPKRFESLFWMPLVNNLLKKSLVPVVIFCFSKNRCDKSADSMFGTDLTSSSEKSEIRVFCDKAFSRLKGSDRNLPQVVGIQSLLRRGIGVHHAGLLPIVKEVVEMLFCRGVIKVLFSTETFAMGVNAPARTVVFDSLRKFDGKEHRKLLPGEYIQMAGRAGRRGLDNIGTVIIMCRDEIPEESDLKNLIVGKPTRLESQFRLTYTMILHLLRVEELKVEDMLKRSFAEFHAQKNLPEKEKLLLQMLRQPTRTIECIKGEPSIEEYYEMTLDAEAHREYITEAIMQLPNSQQFLTPGRLVVVKSDSDDDHLLGVILKNPSALLKKYVVLVLTGDCSSSALAPEFNKNEKGPVDFQGGQFIVLKGKRGMDDEYFSSVSSRKASGVININLPYKGDASGMGFEVRAIENKEIISICSSKIKIDQVRLLEEPNKTAYSRTVQQLIKEQPDGTKYPPALDAIKDLKMKDMYLVESYRAYHILLQKMSENKCHGCIKLKEHISLMREQKMYKDQLNELKFQMSDEALQQMPEFQGRIDVLKVIHYIDSDLVVQLKGRVACEMNSGEELISTECLFENQLDDLEPEEAVAIMSAFVFQQRNASEPSLTPKLAEAKKRLYDTAIKLGKLQSEFKVPVDPEEYARDNLKFGLVEVVYEWAKGTPFADICELTDVSEGIIVRTIVRLDETCREFRNAASIMGNSALFKKMEVASNAIKRDIVFAASLYVTGI

SEQ ID NO: 69645 - protein, 109 aa, Zea Mays
MEAAAGEGPTTTMKTVCVTGAGGFVASWLVERLLAGGRYKIHGTVRDPGDAKNAHLLGLDGAAERLRLFKADLLDFGSLAAAIAGCDGVFHVACPVPDYTLTDPEAPAS

SEQ ID NO: 69646 - protein, 92 aa, Zea Mays
MVSLPSSVHGSPRNPRGRVRSVSDERRLRRPRARCRGILRSLCRRRAPTSSCGHSMSMGACSRKCQWLLRSSPIILPNEALVGLLSLSYMKI

SEQ ID NO: 69647 - protein, 541 aa, Zea Mays
MRCPLFVQVCWTQPESRPAPRLQGSRLGITTVVSTDSIRHMMRGFADQKQNPLLYASTYHAGEYLDPIAVAQAKAKHKANKPTVVSHPNTCGGTSSDDKSQQGSSELPPRAELIGSKQMAVEGYKAQSEMVIDSLDRLITSWEEQKESVIVEGVHLSLNFVMGLMKKHPSIIPFMVYITNEEKHMERFAVRAKYMTLDPAKNRYIKYIRNIRAIQEYLCNRADKHLVPKINNTNVDQSVAAIHATAFSCLRRRAAGEQLYDLNTNTAAVVDEEYRNQRAANTLGSKGMFQLIQRQGSSRNLMALLNTDGSVTKAWHVGATDGGGENLGGNTSSGKKPDENRVLDASQIGKAEAVNLQFGPFGISAWMSDTGGTSHAGSVEDLRADGVETGGRNYSSCCSSPKTSDSTSKELMEDYSVYVSEEEEEEEADDPCDAETDEDLSDEERDMHEIDAGSVDEHSTKSDEEYEDLAMRDVMESGDWSDDEQQGVSKTKNSPTLECSIHGSGAAEDDGINGRYHHNLDLFLKMSKEVVASNRMPCASS

SEQ ID NO: 69648 - protein, 119 aa, Zea Mays
MFDASGEPTSLSFVFHKPHNPSTAATMSSSPSSVNRRPPGPLALGLESLGKKISIGWSPSRAASSPSRVAPTRPHWAMASFPVVQVFSVLRLHPCASAGIIASNLPRLHNLIQRQSKGA

SEQ ID NO: 69649 - protein, 377 aa, Zea Mays
MGRNLPAEQVEAPRSSKMDKKRKKDKKRKLAAEAEEEAAVTATVETVKSSKKKRVENEPGAGAVEAENGAEKTVAVTGKGSEDPKYAPLRSFSAAELPSQVLECCSAFARPSPIQAHAWPFLLDGRDFIGIAATGSGKTIAFGVPALMHIRKKVGGKAGKKAVPRCLVLSPTRELAQQIADVLSEAGAPCGIKSVCLYGGTKKEPQISALKSGVDIVIGTPGRMKDLIEMGVCCLNEVSFVVLDEADRMLDLGFEPEVRAILSQTSSVRQMVMFSATWPLAVHKLAQEFMDPNPIKVVIGSEDLAANHDVMQIVEVLDDRTRDSRLLALLDKYHQAQSNRVLVFVLYKKEAARVETMLQRRLLQMSLHVDLIFLMLK

SEQ ID NO: 69650 - protein, 180 aa, Zea Mays
MASWPAASRRRSSGGMKSAELSGSGASYGYGRTSSSPDACGYGRQFSAYSARSSQVSRSGSFSAAAQRVAGAFTGCFVPRRQVKAGEEEEEEEKKSKRSMDSAGSWQEGRALTIADVSKATSNFSEKNVIRQGRSSTMYRGKLRDGSQIAVKCVTKVGNRTPPSSMLWIAHRAGELQQCY

SEQ ID NO: 69651 - protein, 99 aa, Zea Mays
MVEKVEKVRTTLADLLAAEVFSSIAPGENSCHNIIDVGASTSKHTSWMEKVHQKKPRKPTPKPLKGTRKLSQVMRKMLGKKIHPEQLNGRSNAEGPLTV

SEQ ID NO: 69652 - protein, 276 aa, Zea Mays
MSLCCCCSTATGRGVLLPSLLLGRRHWTGHHLLNLRATTTVVSSSSAAATSSLSPPQQRQITVYVDTLLEWNQRMNLTAVTDEAEVMARHVADSLAMLPPLERVYRGRSTSAGGAIDGVRLIDVGSGAGLPGWKFTLLESMRKRCTFLEHAVEAMNLSNVDVVCDRAEKVGQSLDFRESYDIVAARAVAELKVLAEYCIPLVRIGGLFIAAKGHDPHEEVRNAEGAIKKLGASMLELCNVESMGPHGQRTAVLYVKERATPKKYPRLPGTPSKAPL

SEQ ID NO: 69653 - protein, 335 aa, Zea Mays
MLLQFNLPGHTKLLEDDYQLIGDGTHFVNPIYADLISMLKLIWDVGHDVTETSSNYKIEYLLMQVFAKLGNRLNSGCDLEFFDLAICNGTAEIKNEAIISLPIIVLYSGPRILGAMFKKLESVDALGLENVGKHIAFSLGFLSCLNGTTYYTDNVGKGNHCKLFLDKHYEQPVSTLDLLLRGFCCPQCDIRNRTIHNEEQISIVNIAPLQVENADFNINISKAHTLLFKFLYAGTSEEFIVSLVEVLPRLLRHSNRRLLLEMRTQWNQCFEFLLCHEMKAVREAFSGVVYCFLEDSVMDILFSGGLGMNGGSKELQFMDKIKCAFTEAEDPQILL

SEQ ID NO: 69654 - protein, 179 aa, Zea Mays
MRLRSRAIFPLVRTTAITTSAVSSPPAVLSVGHALRERRRFTEDDVAAYAAVSGDRNPVHLDDAVARELSGFQRGRVVHGMLVASLFPSVIAASFPGAVYASQTLKFAAPVYVGDEVVARVKALNIRMIGTTNCSTTSRYLVKFATKCFMDKEEGLVAIEGEAMAVLPTLELSSQSTSN

SEQ ID NO: 69655 - protein, 372 aa, Zea Mays
MATLAPPAVEVEPEADAMALASEAAAPELPSSHSQLDFFKTRVQLLCESNTRDFDAWVSLINAAEGTSADDIEVMSLVYHNFLLEFPLCYGYWIKYAAHKARLCTTRYVMDVYEQAVHAVPHSVDIWVNYCEFGICAFEEPAHVRSLFERALSLVGKDYLCYHLWDKYIEFESSQKQLIHLATIFINTLKFPTKKLHMYYESFRKFVTLLEQEVTSCVAEILSEKVHASEMVGTEGSELDISTIIADLFDQKGGHLSPEALKHYLSAGEKLYKMSSKIYKEICYFEASIKRPFFNVKTLDDDQLENWHQYLDFVEKNGDFDWAVKLYERCLIPCANYSEFWIRYSEYVDAKGGREIANHALGRASSCFAKAG

SEQ ID NO: 69656 - protein, 64 aa, Zea Mays
MTFFSVFDVPVFWPILLCYWVVLFVLTMKRQIVHMIKYKYVPFSIGKQKYGVKKSVASTSSSKD

SEQ ID NO: 69657 - protein, 483 aa, Zea Mays
MPLKRTSTPSGTLLLPLLNGTTNETTRKKAGRGNPLAARARAADTSTSTAATSQPVRGQQLGSSPTLAPPSAITALVRAHPPPRPAHHPPGPAAYLTPPPPGHSALSVSERPSLPPRTPRRPAPSVTAPRPATETGRRDRQRPAAMGEDKKAGNKDAAGGDKKKDAGAGAAPQPIVLKVDLHCAGCANKVRKAIKHAPGVESVTPDMAAGKVVVTGPADAVELKERIEARAKKPVQIVSAGAGPPKKEKDKEKEKDKKADGGEKKADKEKGGGEKKADKEKGGGEKKADKEKGADKPKEEKKKPKEETVTLKIRLHCDGCIERIKRRISKIKGVKDVAFDAAKDLVKVTGTMDGAALPAYLREKLSRDVEVVAPGKKDGGGGGDKKDKGAGDGGDKKKDGGGGGGGSRRLLRCRPTAQPPRRLLPQRRRRPLPARASLRVRPHPPPRAPDVQRREPQRLLRHVNSLASPVCRRRRALAPPSSV

SEQ ID NO: 69658 - protein, 54 aa, Zea Mays
MASSSPPPEEHQAGNCFYFDICGTEPDSPVTQGKPRCICHLLVPFKIFLTYLMH

SEQ ID NO: 69659 - protein, 232 aa, Zea Mays
MCESFNNSIMDARYYPVISMCEAIRKKVMVRIQENRAKAEKWTGTICPNIFKKLKINILRSGSCDVLWNGEDGFEVQEKEDRRYIVNLVGRTCTCRYWQLSGLPCCHAISCIYKASKLLDDFTAPCFTKADYLKTYAHVLQPVEGQANWPISDMPRPKPPAFVKMPGRPKTERTREVGEAPKGTKLSRMGIKMSCRLCDKPGHNSRKCFLNPETGKKKNAHIKRDAKKKEER

SEQ ID NO: 69660 - protein, 192 aa, Zea Mays
MHKLTLDGVDVMGERLAQEVIEEINRRPYIKKISFVAHSVGGLVARYAIGRLYKPPKRTSENTPQTLDDNNIGTIHGLEAVNFITVASPHLGSRGNKQVPFLFGVTAIENFACYIIHLIFGRTGKHLFLTDNDDGKPPLLQRMVDNWGDLQFMSALQAFRRRVAYSNVGHDRILTSLLKLACSNKPCLKFFP

SEQ ID NO: 69661 - protein, 654 aa, Zea Mays
MELLNDDLIKKDFTKVGSAEELPQASYSSAGMLEDVNNVMVLTRDCEKTKVAGFTKLDEEVIKLIEIEKPILNEAITIIRKAAPMMEEVELLVDAASRLSEPFLLVIVGEFNSGKSTFINALLGRQYLQEGVVPTTNEITLLSYSEVESENFERCERHPDGQFMCYLSVPILKEMNLVDTPGTNVILQRQQRLTEEYVPRADLVLFVLSSDRPLTESEVGFLQYVQQWKKKVVFILNKLDLYRNSNELEEATAFVKENAMKLLTAEDVTLFPVSSRSALEAKLSYSKNSDGKHSTEAMYNDPRWRSSKFFELEDYLLSFLDSSTENGKERVRLKLETPIGIADRLLTSCQRLVKLEYEKAVEDLASIKDLVYGANNYAIKLKSDSSSWQNQISSLIERAKGRAVTLMESTLQLSNIDLIFAYTIKGKTGSSMRATSFVQNDILSPTLDDAVNLLGDYSTWLSSSNTREANVYLECFCERWDALVAPEERALLDPNGLVNEGEKLTIKALEGFNASAAAKDFEEEIRELAFGTFGGLGIAGLSASLLTSVLSTTLEDLLALALCSAGGFPGRRKHAIDKINKAADELSRKVDEAIQKDISQSANNLIRFVEVISKPYQEACQRKIDWLQGVQGELSAVERKLQTLKVEIQNLNGS

SEQ ID NO: 69662 - protein, 197 aa, Zea Mays
MCSDIVLLLCSNFRKYEEICPPLVEELCYITDYSYTKEEVLQMEASVLNNLKFEMTVPTAKCFLRRFVRVAQVPDKVHVSLFCSSYQFHVLVDFFFFLQGSSLHLEFLVNYICELSLLEYSLLCYLPSMNSSLSYYTRYTPSELRGCVRVLHRLFRLGPGSNLPAIREKYSQHKYKFVAKKYCPQSIPTKFFQDLTS

SEQ ID NO: 69663 - protein, 106 aa, Zea Mays
MRACGAEKRRRQRELELQGGEGRHGDEQGRPACREQVLRRPTPLQGRGRCPGRAEQFEVRCRPTPKMGHGDRRWGRDEDDLGSGEQSTRSSATGELDVSWVSTGAS

SEQ ID NO: 69664 - protein, 413 aa, Zea Mays
MGALCDFCGEHRSMVYCRSDAASLCLSCDRNVHSANALSRRHTRTLLCDRCASQPAMVRCLAENASLCQNCDWNGHIAGSSSAGHKRQTINCYSGCPSSAELSRIWSFVSDIPNVAPEPNCEQGISMMSISDSGVSNQDNAAGDSILLDIASATLVSDIGTCDKLLVGSSSGAGVNLLPLATGQTETAGSVDSTPDKDSCMQVPYTPDKDMFSKDSIYEDFCVDDADLAFENYEELFGTSHIQTEQLFDDAGIDIYFEMKEAPAGNSTEQSKLKQPANSNAVSADSGMSNPGVKGDSSVCTPLRQARSSLSLSFAGLTGESSAGDHQDCVVSSLLLMGEPPWQPPGPEGSIAGGSRDSALTRYKEKKMRRKFDKKIRYASRKARADVRKRVKGRFVKAGEAYDYDPLCQTRSY

SEQ ID NO: 69665 - protein, 580 aa, Zea Mays
MGDLVVGLAKSVVEGVLTKAQSAIEEESKLRQSAQRDLVFITGEFEMMHSFLNVANEERAKNNVVRTWVRQVRDLAYDVEDCIEFVVHLDNRPHWWRRFIPSCMPASALPVDAVVAEIEKIKVRVEDVSKRNSRYSLISDSGSKPVMQQQPATGPAIGTTTLDMFVESRDATKKQQGLGDITQLITKENIDLGVISLWGTGGDLGKTSIIRKAYQDQEICENFGCRGWIKLTYPFNPHKFLQSLVTQFYTNSCLQQGTTLDVAQLKRMVAKRGIIEEFTKQVDGKRYLLVLENMCTMGEWDAIRACLPHRNKGNWIIVSTEHHEIASLCVGHSYQVLELKQYSAEYPVCVFFKESKKTGRVISSSGEILEDEMSHRGGLTYGRIPTSRKALASSWMDQSTLVGRESQMNELRKYQTTARFKDWQVMSVWGIAGVGKSDLVKNLYYERMLKEDPMFDKYGWVHVSHPFNLRDFSRNLLLDFHSDAVGIRDPIQECHKLLKEHQCLVVIDDLQSVEEWDLIRPALVSRHSKSVIIVITTDEKIATYCADDEEVVFNVKCLEAEASFDLFKKEFGCTIRSIQC

SEQ ID NO: 69666 - protein, 145 aa, Zea Mays
MPFALRLWLSALPGFLLVLENGTTATAKGEWRRPANTATASACAPHQLWRAPSKQLAACVRTVWERGGGGGAAVCPLPLSVVRSSHPFERPAVRTGSAVRAVPCAPTHPLSLSPESARTLDTATPAEAGHRIGSGRCRSLPFQPL

SEQ ID NO: 69667 - protein, 656 aa, Zea Mays
MEAAAMDFHTLSRRELQALCKRNGLRANMTNAAMAEALQGLTSVDGIDEIGTSLCLPTPGRSAMKSAAKMVAVAVEEQQHGSPLPRGRRVSVKPPEAIRMEVEEGEDEMKEIVKTPGVALRSTRRGTRATPAPLPTPVAACSTRATAGRTAARKTRDVAPTPATRRSQRTASRKAAGAVEVDRRAEDVSEEKTSDMTIALDQEAEVLAAASKEEKVQQDEKKDVKCDDPKEEDKVQQEEPKDVASDVKIDDPEQEEVANKDEESEEGDEDVSVKSCNDPKVDEVVVVIGEQSTKSHDGIVKEQEPISVEKSAHLTVMEDSTILGVIEDLAELSPAREMPDEIIPVTEDNEVAINEETIKEDDFADAIQTDPTPKEINLTAAGEDKIIEGKEGADDKMPQAAETSEHDEDTEFKEGAADEVLQAELADNETSDGEDDRTEVREGAAAKTLQGELTDDETSEDDLHEDEEWASDDEETASSDESDEGTESNEGSYIADAVQMLQGTGIVEVADEDASTEDDFSGDLPPEFDNIMIFRDAETDSDSVPPALEENQAVAFATKAAESLGDSAMNAEHYEGPEEADATEKTMKVVEDIVKSLDESSFKEGESKETQKKQPQDYDIMSLIKLRSTYKKCLIARKEGKRPPLEEVDGNACIDH

SEQ ID NO: 69668 - protein, 400 aa, Zea Mays
MGCVFGRAAASSSAAPKKKWGKGRSSPQPEAGSPSAVAATDGDGRPRRRLGGRRASGPRQGCVPAAAAAEQLAAGWPPWLVAVAGEALRGWAPRRADTFEKLNKIGSGTYSNVYRARDTVSGRIVALKKVRFDNLEPESVKFMAREILILRRLDHPNIIKLEGLVTSRMSCSLYLVFEYMEHDLAGLAASCDVKFTLPQIKCYIQQLLSGLEHCHDNNVLHRDIKGSNLLLDNNGILKIADFGLATFFDPRHKRPMTSRVVTLWYRPPELLLGATEYSVGVDLWSAGCILAELLYGKPIMPGRTEVEQLHKIFKLCGSPSEEYWKKSKLPHATIFKPQQPYKRCIRETFKDFPTSALPLVETLLAIDPAERQTASAALHSDSANISTKQGDGCQVKRRGG

SEQ ID NO: 69669 - protein, 714 aa, Zea Mays
MSIAAVSADGLLALADEAERRYDFSAAAACLESALRPPYAAALLPLTEARARLRLASLLLAPRGSSRVPRAGAPAAAKTHLERALLILSPLPSAPPRLKLLAHSHLAGAYAVLGAIASQKHVLHRGLGLLDSASASGLLQREPALLWTCNFQAQLGSVFTNDGDAASALSALSVGASAAAELGSPQLELFFAASELHVHLLCWEDSAAVENAVTRASLLWDALTAEQMEHWVGLFFYTQLLQTFYLLRICDYKAASQHVERLDTAVKSEMQRGRQITALANDLSTLERTLGQSGLKEREMLALSHKQRQLKGQLRALCGYDSLNDVLDYGDKLLLAPPLMHGEWLPRTAVFVLVDLMVVMVGRPKGIFKECGKRINSGLRLIHEADLEHSTIWTAGLYLILLLQFLENKVAVELTRSEFVEAQEALAQMKNWFTRFPTILQGCESIIENLRGQYAHSVGCFDEAAFHFLEAKKLTESKSMQSMCETYAAVSYICKGDAESSSQALELVGPAYRTMDSFVGVREKTCIIFVYGLLLMRQHNPQEARNRLASGLKIAHQQLGNIQLVSQYLTILGTLALQLHDAAQAKEILKSSLTLAKTLFDIPTQIWILSVFTELYRELEEKENEMENSEYEGKKEDDLQRRLSEAYSHSFHHELVEKSRIQPLHMSSKQPEMAVPSANGDLDIPESVGLSAPQPFLKRLVEAEPMRRSTRRRR

SEQ ID NO: 69670 - protein, 835 aa, Zea Mays
MVHETRSRVHAAAQEEGKLASKKQKPDNETKERGQNVPSKNKKSADNEGKDGEPEAPTKSKKLKAEESEPNGREAAAREFAEFCKAIGERLSLEDMRKILQANEQDASGSEDAVVPRCEDMMFYGPLEKCPVCEGQLEFKEWKYKCTGNYSEWARCTFSTNDPSRRSGSIEVPDDIKDDFIRKWLKQQEGKEFPKRDLDEEAHIFSGMMIALSGRMSRSHGYFKEQIMKHGGKVKNSVLGATCVVASPAERDKGGSGGFAEALERGTPVVSENWIIDSIEKKEAQPFAAYDIVTDVVPEGRGLPLGQLDPSEEAIETLAAEVKLAGKRSVHKDSKLDKDGGCVFEKDGIIYNCAFAVCDLGCQMNELCIMQLVMVPGNRLHLFYKKGPIGHDQMAEERVEDFGSRVNDAIKEFVRLFEEVTGNEFEPWERQKKFEKKSMKMYPLDMDVGVDVRHGGAALRQLGSAAAHCKLDPSVSFLLKQLCGQEIYRYALMEMAQDLPDLPIGMLTDLHLKRGEEMLLQMRRDAETVAESGPEADAFWTDASSKWFTLFPTTRPYTMRGFEQIADNVASGFETVRDINDASRLIGDAFRSTLLDDPLSECYKKLGCCISAVAEGSEDYKMVLKYLEKTYEPVEVEDVVYGVSVERIYAVESSAFPLYEEIRNLPNKILLWCGTRSSNLLRHLHKGFLPAVCHLPVPGYMFGKAIVCSDAAAEAARYGFTAVDRPEGYLVLAVASLGEEIEEVTGTPGAEARVLEEKKVGVKGVGRKTTDESEHFSWRDGVKVPCGKLVPSANKDGPLEYNEYAVYDPKQVSICFLVGVKYEEQNMEVVPPDDQ

SEQ ID NO: 69671 - protein, 194 aa, Zea Mays
MARSPAASSSSYTDSTGSSSDSGSSSSGIDRRRRRHRHRSSRRKEGTSSSALKARKDRRSRHKRRRHERERRRSASDDDSYSTSSYDSDREVSGRSRKHKKSSRSRKFRERERSKDRHHRRDKSKHKEKKESEHADGPVQLSKFLGRDKEKEEGTQRSAISGKKIMMKLEKTKEDKAAESKRNELLKFLNASYD

SEQ ID NO: 69672 - protein, 127 aa, Zea Mays
MKTVKSMKKIVEGLKNMVEILFKLPMIKLLMAAVEEGIENSAVEEGKEKENDKEKEEENGNEKSKETGNETEYEKVKNIKLVHIDYILEKAETGVQFVGNVMRSSSQTRRAHCWFPCVDSATERYLT

SEQ ID NO: 69673 - protein, 193 aa, Zea Mays
MGKRPPTDPKRFGDTSNAGSSSGWTDEKHMLYITFLEESFVNQLYSSKGEMNSAESFYATPGAWQKSSYSGNGRNTKYDEGHGYWGTVEVDGDGADYMDDDASTNGPRQERDTSYHARQRNSRGSAAFRLRQHGHSFSWRESSDQNFLDGETQGSKEQGRGSSKNQQKHADTTKVYASSSFVIQEISHPHGEA

SEQ ID NO: 69674 - protein, 774 aa, Zea Mays
MAAGGRVSIPAGARRTIADIKEIAGGHTDEEVYAMLRECNMDPNETVQRLLLEDTFHEVKRKRDKKKEVSKEPSDSRWRPAVQGQGGKNCRNCASRSLSSSNDSAGRSAISGKENGISLIMGKGSGSTPITNMNMDVKASTFMPSNSLLSGLCNGPYQSVDPAAVLVSSSSAVGDKSGSTALADLTGGLPFKDVVATIDPNSLQPLKPAPPSDPVVVSFLNSHSLGDVGASRQTIGIKKTSVEHKVGRDVSTDKVIPSKEWKPKLTCLAASQATEDATVHDNVPLAAADTITQSAPVPNSAGTEDSLKVDICLNDLQLSDKQHVIIPDHLQVSESEKYVLSFGSFDVSFQQTKGSSDPDYVKSSLPKFSSSHELDGNIDELQSMQRDQNSTSVVQEEAGHVPQPSAKLEKCAPSAMEISSIALMESKDCDDDSATSGDPQSTGTHSAPSYVTYGFAPQSHVNQIEKSESHSQSYHPTTDADERLSPSLATQAAHKYGNIPVVPTQTGQDQEGNDSPVIISSVSASVATPAAGVLSASVAIPQQSVPVFRQPLGVHIPHLPMNYVPYNQYISPFFIPPPTLHPFMGNATFSQPPSTGVMYPTPGTARVLPPVKFPVPSFKPGANIGSQASIGVPGCYGTYGSSPSVYTNNAPVSSGNLAENDNVTSSQFKENNIYFAGLQTDGLTLWVPTPGRDISALQVNSFYGLPPPGHQVTYAPQAGHGPYGGIYHPAHSVAGATVTPLLQPSHTMAGAVEIVGAPGGVYQHPQAHMNWGSY

SEQ ID NO: 69675 - protein, 266 aa, Zea Mays
MIHLLAGRLLCADAVRDCRGSRAIYLRVGAMVGAVTSGRLADFLGRKMTMRISATICIFGWLSIHLAKSAIMLYFGRTLLGFSTGVLSYVVPVFIAEIAPKNLRGGLATSNQLLICSGSSATYIIGALVAWRNLVLVGLVPCVLLLAGLFFIPESPRWLANVGREKEFHASLQKLRGEDADVSEEAIEIKEYIESLYSLPKARLRDLFLSKNIYAVIVGVGLMVFQQLGGINGVGFYASYIFSSAGNQMSVLLCCPFVTALYGFFF

SEQ ID NO: 69676 - protein, 274 aa, Zea Mays
MAPAPAAASAGRKSHVTVLLLYVVCGLILLLLLASYSPRLQPHAHGRSLHRRLKLHPKSSLPSDASSGGNGGQQKTQHQNHHAASFDPTIAELERRLDDKEWEREHYSLLHGGEPDDHMKEWEEFLKEEEDFINDDDRFNIADRIRALFPKIDVAPQDGFVSLDELTAWNLQQARADQHHRSAREMELYNKNGDEIVSFEAFNALRQESHGEGNMLGFEWWKEDHFNASDANADGFLDKTEFNDFLNPSDSDNPKIINLLCKQEIRGIKMVMES

SEQ ID NO: 69677 - protein, 403 aa, Zea Mays
MARHLAPSSGSLHRLLASCHYPPTSQAPPPRPLLLPKTRSAAMQLPRRGRRDVVAAAAASAPSPSSPGTEVAVWGKVSAVLFDMDGVLCNSEEPSRQAGVDVFAEMGVEVAVDDFVPFMGTGEANFLGGVARAKGVKDFNPESAKKRFFEIYLDKYAKPNSGIGFPGALELILECKNSGLKVAVASSADRIKVDANLAAAGLSVFLFDAIVSADAFEKLKPAPDIFLAASKSLGVDTNECIVIEDALAGVQAANAAEMRCIAVTTTLEEIALRQGSPSFIRKNIGDISINDILYGGSNARHNEGAGSTENSSSVGNALSESLNGATAAGHSDTKGFPISKNKGLLGSRREILRYGSLGIALSCLFVAVRNWKAMQFASPKGLLNFLMGGNSSVFARNEGTQCT

SEQ ID NO: 69678 - protein, 69 aa, Zea Mays
MARLCSSSIAPTAHLPASARSRAPLLGQLFPSSASRGLARPRSPRPIAALQLQLAGAWFPARISPAAVL

SEQ ID NO: 69679 - protein, 202 aa, Zea Mays
MAMRAAARQAILSPPLGPRSPRPFLCGCSLSIAPRLEPCRAASSTTAPAAGKHLPPLFSVAPMMDWTDNHYRTLARLISRHAWLYTEMVVAETIVHQKDNLDRFLAFPEEQHPIVLQIGGSNLENLAKATELANDYSYDEINLNCGCPSGKVAGHGCFGARLMFDPEEMPCQLSQLIVMSQLVLNAELVLTIVILMKNYVNL

SEQ ID NO: 69680 - protein, 57 aa, Zea Mays
MVVISNFMLLVVFRLCIPRKIAYEYTLTISNPSRINEQIDRHLKHDLVYPAAATRYH

SEQ ID NO: 69681 - protein, 213 aa, Zea Mays
MHIFFLNQTIFYRTKEGIWKDIKEGGILDEHIVHEKEIAISDIQQTVESVQLDIKHLLEAAAAKVAEVQLEVNQLYGFAETLNSLNIIQEHDIVFKDMLHSELTGLTNTIGESYRIQDECKLPMHISPDVNLDRHQEANGGSEQEGVELELQRELGRELQDQCRRLSQQYNRTTLLLSMRCQMFMHIPVKLNRAIRSAYIQGMEIISKGRAIL

SEQ ID NO: 69682 - protein, 356 aa, Zea Mays
MCKEVDQNPQSPPVVRSDPKTSNRCAFNVPRTPVNDARTQINNVTLEGAGATTPINVSPQAAVAATPFSYTSKGVGAMTPVHVSPQGAGATTPINVSPQAAVAATPFSYTLKGVGAMTPVHVSPQGAGATIPINISPQAAIATTPFNYTLKGVGARTPVHVSPQGAHATAAVKVSPQWNRSNDGRWNRSNDGRPICQCTAGKCKILRVGNEDWYVCPIPKGQGACSYKVPVTDAVGAGDNDDANGSANPAQPNDDEWPFDVINDEIVPTPRAVAQQKSPSTPHHQRSGTARTPAPSPVTPFGSRGAMTGRPNDTCFGCGEKGHWISACPKPSPRSRCFRCGVVGHRPANCPQPRGS

SEQ ID NO: 69683 - protein, 84 aa, Zea Mays
MLIRGRVSYTSPIPPFNVVSVESSTSYSEQGHTDERRDDMDFSHSSIRFCALIMVWSLGSGTSLDVVAAAIQILEIYFVHINGT

SEQ ID NO: 69684 - protein, 79 aa, Zea Mays
MELELAGYIDMLSCTIDPFEYDMKEILDVLSVPEMKEILKELPKDNTIRTRRHELVSTLLSSYRNSTCASLPKRILKWT

SEQ ID NO: 69685 - protein, 109 aa, Zea Mays
MCILRHSPALSSPLHFIPDRRSRRASSAITHDELGVRRSLRAGIPRVNDSRRWLPPSGPHACGGLQERIGLPRRAQRGHPVAAGLLCSRGRCSMGGICLVRGLEYSWGR

SEQ ID NO: 69686 - protein, 56 aa, Zea Mays
MGLLDSLYRVVMRRNAVYVTFVVAGAFAGERVVDYGVHKIWEMNNLGHLSIYHSEV

SEQ ID NO: 69687 - protein, 235 aa, Zea Mays
MSSSTSGTREMLSPNSTATSIGQVQKVPGFAKLQGENFVYFMQTYSIMLGRTSRSYTADFDLSKYECGSQCVSRCHACIFYDFELRHFAIEVLGRNGCTIRGVSYLPVSKLHIQIADKDTDNQQILLEEEKDVTTCLTTLISELSGPKEWVPMERLLSEISKRFGKKWLRDRVSKYLPQKGMSGSSTKVDHRPWCSLWELLRKHPEHFVMTTLTRGEETSDYVGLVHLVSVENEP

SEQ ID NO: 69688 - protein, 248 aa, Zea Mays
MLAYSTVGTPDYIAPEVLLKKGYGMECDWWSLGAIMFEMLVGYPPFYSEDPMSTCRKIVNWRSHLKFPEEASLSLEAKDLISKLLCNVDQRIGTKGAHEIKAHPWFAGVEWEKLYQMEAAFIPEVNDELDTQNFEKFEETAPPMQTSSKAGPWRKMLSSKDVNFVGYTYKNFEIVNDPELPGIAELKKTNNKPKRPTIKSLFETADSEDQPSDGSFLNLLPTQLELPESLEPSPHSSISSEDSQARNR

SEQ ID NO: 69689 - protein, 52 aa, Zea Mays
MAARPTSAQRAQSLPHAHAEQAPTSVLARIPMVVILLSPSLCCSCSSMEEIA

SEQ ID NO: 69690 - protein, 356 aa, Zea Mays
MLFDGEKTQSVIQSCDVRPVPLTVHRPTMKEAKRVYCNLTQLYYEMECSTTDETLPDAGSVKNVEQGQGKKNEVTADPGESISDLSARLELLNKNEAATIPSSKNETTPLHEAAKCGNAQLTLELLEQGLDPCVKDARGKTSYSLASDKEVRNTFRRFMALNLDKWDWHAADVPSALTKEMEESQAAKQADKDAKRKARAKELKKLKKEREKEEKEKEKEKAKAQASQSQSDVKGTSSGQMANRTATAPGLVPKHQTPQQILIAKEEERQRKQAEEREKRAAAAERRLAALAVQSAGTSASGAAATNCSAKRAAPDDNSCSCCFGSLVGKVPFHRYNYKYCSTTCMHLHSEMLQDD

SEQ ID NO: 69691 - protein, 824 aa, Zea Mays
MVKAYLRYEPALTFGVIASPESNVVYDPSGRRLLAAALDRLAAWDIKRGLPSVSFAPSSSSPSLAVSCIASSHSAAVSSSIASGHADGSIRLWDAETGACEATLHGHRSAASALRFGPSGAVLASGSKDCDVILWDVVAQAGLFRLRGHRDQVTDLVFLDSGKKLMSCSKDKFIRVWDLETQHCLQIVGGHRSEIWSMDVDPSERFLVSGSADPELQVFRIRQSVEEGEDWSKWDVLKLFGEIPRQSKERVANVRFNRDGSLVVCQVAGKTADIYRVLDETEAARKAKRRVSRKKEKASAKSMIAEENGTIIDPLPVQNLQNPTVIVTDVFKLFQVLRASKKICSITFSPSNPPRGCLATLSLSLNNNMLETYSVDKEKVSKMYSVEMHGHRSDIRSVSLNSEDNLLMSTSHNAVKIWNPSTGECLRTIDSGYGLSSAFVGNRYALVGTKSGTLEIMDIASGSLTEAIEAHAGSIRSIVPIPDEDGTVGARGFVTGSADHDVKFWEYQLVQKSDNDSKQLTVTNVRTLKMTEDVLAVSISPEGKHIAVALLDCHVKVFHMDTLKPSLNLYGHKLPVLCMDISSDGALLVTGSADKNLKIWGMDFGDCHRSIFAHSDSVMDVKFVYRTHYMFSVGKDRTMKYWDADKFELLLTLEGHHAEVWCLTLSSRGDFVVTGSHDRSIRRWDRTEEQLFIEEEKEKRLEETFEADLENDNDYRYGQKDDAPDEGSVGVPGRKTKETVTSADAIMDALDTAEEELKRINQHKMEEQITAKAAKFQPNVIMQGHSPSDYVLNVVSSIRPNDLEQALLILVHGKLNCVQTCYQL

SEQ ID NO: 69692 - protein, 493 aa, Zea Mays
MGMDAGGGKLPYSYAGQQDGGKLVKSVSRVEPRRFGLGLVAGFLLVTCAYFSTAKFDAIQIAMSGLEDEELQVQDAVASGSKRSKDSAAAAAATRSANVSSPSVVHSHHAILPAPAQRIPEVKQADSETTPAREREWKPLCDVTSNRRIDWCELDGDVRVVGANASVTLVAPPGADNRTFRAESWRIKPYPRKADRGYTGNYFHAFTDVILPLFLTARRYAGEVRLLVADLQPWWVGKFLPVFRSISKYELVDLDRDPRVRCFRHVQVGLTSHADFSIDPRRAPNGYSMLDFTRFMRAAYGLPRGDVVAAAPARRPRLLVVARARTRRFVNTEEIVRGAEAVGFEAVVSEGTHEVAPFAELANGCDAIMGVHGAGLTNMVFLPTGGVVIQVVPLGGLEFVAGYFRGPSVDMGLRYLEYRIEPEESTLVDQYPRDHPIFTDPNGIKSKGWESLKDAYLDKQDVRLDMERFRPTLQEAIAHLRKAKAKANGDGNN

SEQ ID NO: 69693 - protein, 164 aa, Zea Mays
MRKKLDTRFPAPRIKKIMQTDEDVGKIAQAVPVLVSKALELFLQDLCDRTYDITIRKGVKTVGSSHLKQCIQTYNVYDFLREVVSKVPDIGPSDVIADDKLGKRRKAEEDGSEEELKRTRNKAIQAMAEAVGEVVGEVAVVYVDLGGRWSQVLNNSRRRINLAR

SEQ ID NO: 69694 - protein, 357 aa, Zea Mays
MRDDMGMTIEDVIEECKVFYFAGMETTSVLLTWTMVVLSMDPEWQDRAREEVTALFGRDGKPEYDGLSRLKVVTMVLYEVLRLYPPATSVVRQTYKEMELPVLLIHHDPDIWGGDAREFRPDRFSEGVSRASKDPGAFLPFGWGPRICIGQNFALLEAKMALCMILQRFEFGLAPSYAHAPHTVITLHPMHDCKNGIAKQAKISMAYSFIHRPLSDEAHRVSTPVVVTCNDQRREVFVAQNIANKKIDRTVAFDKVLGPKSQQQDVFNHAVVPLVSEVDGYNCTIFAYGQTGTGKTYTMEGGGDKALNADLPTDAGVIPSVVKRIFDILEAQSAEYNMKVSFLELYNAELTDLLALQ

SEQ ID NO: 69695 - protein, 66 aa, Zea Mays
METKHHMAGEGKERSDLRRRRPSPPSCIASNALSRPSRRPWPPCRRRRLSIPSEFRVHAPLRPWHG

SEQ ID NO: 69696 - protein, 98 aa, Zea Mays
MLPHGNLCGASCLYCPGRPLRNQASTNGKPSTATGERGTRATAVGSHLDRRSNPEDQLGESADLGGKAQRRLRALGSPGVTSIAHRGLDSAAGPPHRV

SEQ ID NO: 69697 - protein, 162 aa, Zea Mays
MAEETDTRPASAGSRGRPAPEDDDREEGEITDLACAPSPPATHPLEHSWTFWFDNPQSKSKQAAWGSSIRPIHTFSTVEEFWGLYNNINHPSKLIVGADFHCFKNKIEPKWEDPICANGGKWTISCGRGKSDTFWLHTLSVCVGSRKELLFGQKMLPMKPLR

SEQ ID NO: 69698 - protein, 770 aa, Zea Mays
MDESRKRAVSTANGKNISSSLDEDFGNDFLSSWKLPKSGKDTIDFSVDSVPKSSKKFSFDNLDDFGLNGAFDKLPSFQMGMSDLDFSSPDKKKVKHTSSNADLFEKKKETDKDNFSFSFDFNELGKFSLDGKLGIEEKSTNRFNGKSDPVSSEVKKDTQRGLLAKGNAILEENNSKDKMHTLDTRTSRPSHLTNHENVKNASQPTSNIDVADSSDKMQEHTSVNPATMEQTKVDSVLNDNPGEHPKEIYAMKAAVNIPSQDFSCGAISSEDPTQGPADHVNSKDAPIVNCGKVHVSRESNDDEQSNGLQSRDTSIINSNVSRRPSGQFNSQNEVLEESVSLNEGSQDNQSFSGAPKKFLKKTSHGTTNTEEEISGPKILSCSVQREIRSVEPAPMKERGSFSLLSKSVHMKATRVELTSETALNQSSSASKVIKKMTTHPTDLKREHMQANAVPHKSKTALSKTYSKLASNGLLATSMNAKVDTNAKLGLEPPISGKSSLLNARSSTPHSAGHKVVASHVLLKASNTSDSLQGVPSKDNKSSTISQLTGARITKLGIRSLKSDMALEKESVQVSGTKCSPVTTSRILDSIPEGKPALPSPSIMQKVPEESALNPKAPKVLKHIMRSPAVRKSPRTVPELGNEMILGSGTPKAHVDNAISSRMPPGMGAISDLELPVLENDGNIEKAEACRKELEDICILLKRKHAEAKELAVRAIVNNNTMLMLNHPMIEEKIYSIQKFANDLKSKKYLFEEVGTINSGANDLSSGAWVM

SEQ ID NO: 69699 - protein, 528 aa, Zea Mays
MARTPADAGSGPHADSAPLHPERISSCRARSSPNRHPPRVQGALPAGVARRREVPEPRAPPPIKLQPFSPGSRIPLAARALSVSSPPPHKKPLNCSVGVMCGILAVLGCSDCSQARRARILACSRRLKHRGPDWSGLYQHEGNFLAQQRLAIVSPLSGDQPLFNEDRTVVVVANGEIYNHKNVRKQFTGAHSFSTGSDCEVIIPLYEKYGENFVDMLDGVFAFVLYDTRDRTYVAARDAIGVNPLYIGWGSDGSVWMSSEMKALNEDCVRFEIFPPGHLYSSAAGGFRRWYTPHWFQEQVPRTPYQPLVLREAFEKAVIKRLMTDVPFGVLLSGGLDSSLVASVTKRHLVKTDAAGKFGTELHSFVVGLEGSPDLKAAREVADYLGTTHHEFHFTVQDGIDAIEEVIYHDETYDVTTIRASTPMFLMARKIKSLGVKMVLSGEGSDELLGGYLYFHFAPNREELHRETCRKVKALHQYDCLRANKATSAWGLEVRVPFLDKEFVDVAMGMDPEWKITTRTWVASRSGS

SEQ ID NO: 69700 - protein, 844 aa, Zea Mays
MMARALVEVEHCRFIDMAESLCQKRALEAFRLDPTKWGGFQVCHSLGGGTGSGMGMLLISKIGEEYPDRMMLTFSVFPSPKVSDTVVEPYNATMSVHRLVENADECMVLDNEALYDICFRTLKLTTPSFCFWTVGDLNHLISATMSGVTCCLCFLGQLNSDLHKLVVNLISFPRLYFFMIGFAPLTLRGSQQYRALTVSELTQQMWDAKNMMCVADPRHGRCLTASAMFRGKMSTKEVDEQMINVQNKNSSYFVEWIPNNVKFHPFVPIIRDSSFDPSPPRSLPLPTPTRTRTGSRSGNHKTSVKAPEPPRAPPTTPRNPNAPPQRGISPITPYQFQFSKGRGGAAPPPPPPLTREETPPPRASPMLSDQELAQYVESLVQHTAAQGGTGISADAVVRQLGAQLGVDLSPKAQLIRSVLVALLGPAAAPAPDPTGSRKDPFDPATAAAAGGPRAETPPQQMHFSTAAASSAPAPSPAVPHFFPQQHQHQMQYFLSAPQQYQHQQQQQRAGASPSPFDIPASYRYGHQPLPQADQAQLQRLVQLQHQQQQLAAAARVAAAAAPTPGESPRAPEPPPAPAPAASKKNSSASVGAKRKGGPGGLNKVCGVSPELQAIVGEPAMARTEIVKQLWAYIRRNNLQDPNNKRKIICNDELRLVFETDSTDMFQMNKLLSKHIRPLESKNDSKPEAKKLKPQGDEPISSVETDVNQLPLMVSDALATFFGTGEREMVHSEAVKRVWDHIKSNDLEDPENPTVILCDSKLKQLFGRESLTAHGVSEVAFRPPLHAIYQYLTDATVWLVGCRRYDFLDSAGLTSWVVGADERTRDLLKLSVVFVSSILVKTDLQ

SEQ ID NO: 69701 - protein, 217 aa, Zea Mays
MGETRDRSIGARARKNRAGAGHGHRRERPPRREGRRARGQPGEQEIWEPRPREMERRRRARLAGFGARQGSRHGRRQKGEQGRARAVVSSRDVRSVVGLGEEERRREGATRQRNPHPTSRRHGWELLQAGGSRGGAELKKHEEEEDHGAQQRSARRRDPKGAQAWRSARLRGATMERTLAGWDWDEPAGPEGDKGERSTRETTHWRRQPEHDDAKYQ

SEQ ID NO: 69702 - protein, 175 aa, Zea Mays
MALDDACAYDCCALPPPLHCLDWDWDSELLHTHRHTTSAGGAAVQAEPPTFFVPATPGVQPSAASSGGYLHDAITHWSDDRRSKRQRMAAAVATTTTPPARRPATTVSEDLQCLLAGFWDSTSEAEGGADFRHDLNTTTPEPEPETTTEIRCSFASGGSFDDTSFFLWLFSILVR

SEQ ID NO: 69703 - protein, 324 aa, Zea Mays
MLKNNIVRNDDGPGAPASSSLPPYVYLHLEQFQLKLSDNVFCDEDQVTLSKFNWMLLKSDSYFAPALFLTPMFEAELAKMFPRREAVFHHLGRYLFHPTNRVWGIVRRYYEAYLARVDEKIGFQIRIFPEKPIKFENMYEQLMRCVREQRLLPELGPAEPPTNATADAGDGKVKAVLIASLYSGYYEKIRGMYYESPTKSGEIVAVFQPSHEEQQQYTSNDHNQKALAEIYLLSYCDKITMSAWSTFGYVAYSFAGVKPWILIRPDWNRETSDVACVRSTSVEPCLHSPPILGCRAKTDVDVAAVKPYVRHCEDVGFGLKLFDS

SEQ ID NO: 69704 - protein, 250 aa, Zea Mays
MADMAQEIVKSNGYSDVITVIKGKVEEIELPVPKVDVIISEWMGYFLLFENMLNTVLYARDKWLADGGVVLPDRTSLRLTAIEDAEYKEDKIEFWNNVYGFDMSCIKKQAMMEPLVDTVDANQIVTNCQLLKTMDISKMTPGDASFTVPFKLVAERNDYIHALVAYFDVSFTKCHKLMGFSTGPRSKATHWKQTVLYLEDVITICQGESLSGSMTVTPNKSNPRDIDIKLKYSINGHRCQVSRTQFYKMR

SEQ ID NO: 69705 - protein, 64 aa, Zea Mays
MLNDLAHILKYIEVFQSAILTLHYSKLKQDQCKPSTRQETITLFWTPHKQTSQQVFFPHQIDTI

SEQ ID NO: 69706 - protein, 634 aa, Zea Mays
MVLKEHGDIQTLYHDDAMKAMPPTNVSKGQQGRRAALDRKRARFTMKDTGSKAVPVVDRSKLLNISDPVAFFMALDRLEEAEDEIKRLNGEAEKRILIFDPLDEPIRQPGLRGRKSFRSFKVTEDATTQDPIEVLASQTATMTGSQFSQDVMHAVADKNEQSVPSRSGEAISDVSGKEDSLAEKDGRDDLAYLLTSIQDLDESEEEAFIRKTLGLKEIRKGRVSLCNSIPGVRSLRSDTEQKGSMKVRPPESHLPQTRQDRISELEKHLFPGGAANAKCTDDESEGSPDIVMGEPSLVHDSSEVLMTNENSTGSEIDRRTPNLCARAADHALDPEPNLPDHAYERQTRGSSLGLCKNTEVANEHEEDDVHIEYPTTGGSTYQTEVSSHDLEGSLTEELVSEPGRHAAPDDIYRTSHAAEDSIQHLEVVKQGGVLQDKSSQSLEMPLEDIDPLYRPQMHGGSTKKSTPVLCNALSPIEQKQQAAQEGKRKQQAKRVKKVSDESSHALEISQANFEPENEPHNVDVNMEQPTVMSSAKGQKGAQRRNKTKKLNQRKILGDVDLARQSGVRRSSRIRSRPLEYWLGERLLYGPIQDTLPAVIGIKAYSPGQDGKKTLKVKSFVSEQYSDLVAQFAKY

SEQ ID NO: 69707 - protein, 84 aa, Zea Mays
MSTVPTDPLLHEQVRATRERTTPFRRSFAKRVRATLAISPLPVRDCLFMYGITGFKLTLSHIQGMWPVKIVLDHTGLHTHPILN

SEQ ID NO: 69708 - protein, 264 aa, Zea Mays
MGMTLTLDDLKTTLLMPKELAAGFILQYTVMPLSGFFVSKLLKLPSHYAAGLILVACCPGGTASNIVTYLARANVALSVLMTAASTFAAAFMTPLLTSKLAGQYVAVDPMGLFVSTSQVVLAPVLLGALLNQYCNGLVQLVSPLMPFIAVAAVAVLCGNAIAQNASAVLASGSQVVLSVGCLHASGFFFGYVLSRVLGIDTSSARTISIEVGMQNSVLGLVLANKHLGNPLTAVPCAVSSICHSVYGSILAGIWRSMPNKDKGE

SEQ ID NO: 69709 - protein, 457 aa, Zea Mays
MIERGHFRELQSIIEMLPLTNGSDEQAARTMPNCETVPILQIKKRQTFVFSATLALSSNFRKKLKRGLSTSKASTPDDVSSIEALSKQAGMKSNAEIVDLTKASILPEKLEESFIECSEEDKDAYLYYILSVHGQGRTIIFCTSIAALRHISSILRILGINVLTNHAQMQQRARMKAVDRFRESENSILVATDGFARGMDFDDVRTVIHYQLPHSTDVYIHRSGRTARKSLAGCSIALISPTDKSRFYSLCKSLSKENLQQFPVDHTYMSGVMNRLSLARQIDKIARKTSQENANKSWLQRNAESMGLILDTSDSEEDHVQGHKKRKATSAHLQKLQQELSDLLQCPLQPKTFSRRYLAGAGVSPLLQKQLEELAKRNASNNSSKSKNKGSGFVVIGQDRVEPLQALQNSGQEVCVNIDKEREKRRVAENWRRKKHEEKKRTQEQKRKDKRKAKEMA

SEQ ID NO: 69710 - protein, 1256 aa, Zea Mays
MPPKKRAAAAASSKKPQPSQPSQPAKFGILHFFERQTQASQNAKRQKPDPPAPPPPPPPPPEKEPSEVSPEVTKTLAPKRVRFSPGMLIKQSQDDGVAEVVTWKISPVNHRLGTTKSKQFLGMAPHPYSSEKNSSLDAMKKWHSSPLGLSRCTTLGSNSGVLGSAIVGCDGVGDTQSPFRTPPSLSYGCNEQVSSGVTSEGGAEPSGAGQHKKALLDLLDQVEDAIMEEELPADPGNKGGQTTNEDITNNSRSPVADTDLTIPSKKTIHVPPFNSFLVLEVSEKHKADDSSCDRYPVKVLRLLNEHSGTECAVHLCDEWFDSIVGPGDTVNVIGEFSNHGKCIVDHDNNLVIVHPEQLISGTRAASSFQCLRRSVLDERLKSNEYSTSALTGTLLHQVFQAGLLNDAPSWQFLEQQAKEVLLKNIETLYACGVNESNMYSTLIEAIPKMLNWFKCFLKGSKCSDVDFGHNEVRKTVGVTEVMDIEEMAWAPRYGMKGVIDASVRSRVESHNGGSYDRIMPLEFKTGKATSGQAAMEHSAQVMLYTLLMTERYLNEDIDLGLLYYLHTDQTLGIKVKRTDLIGLIMRRNELATEILKASMSQSFPPMLQAHGGSGTTSGLGDLFDNLVNHLTVTHHNFLKHWDRLIDLEARASQVKKNILQPHNSNYGSGSSAVPYFVLDIKNGHSIDSSGKSKRYIYNFVQQKMQPETADQLDAQFDSIDFSLKVGDFVVLSTQSGRIAVANGCIREIISHSHITVSLPRRLRIPDSNSLSEQEDLTREIWRIDKDEFSSSFGIMRLNIVQLFAQNPQNSHLRKLIVDLEAPRFDSGGLFSQDPALSYIRSLPNLNNDQQRSLHKILGAKDYALILGMPGTGKTYTMVHAVKSLLIRGESILLTSYTNSAIDTLLMKLKTEGVDFIRIGRPEAVHPDVRAHCLSTTEAQSVDAIKARMEQVQVVGVTCLGMYHPLLAHKKFDTCIMDEAGQITLPVSLGPLMLATKFVLVGDHYQLPPLVQSSEARENGMGISLFWRLSEAHSQAISALRCQYRMSSGIMELSNSLIYGNRLCCGSLEIANAKLKFSGREPMQLKLKEILNPDRAVIFANTDQIPALEAKEHRTVNNPTEAHIISWIIKELLRRGVAQDAIGIITPYNAQVNIIQQYTDCLVEVHTIDKYQGRDKECIIVSFVRSTANSRASGSSLLGDWHRINVLLTRAKKKLIMVGSRGTLSTIPLLRLLVDKVAEIGGLLDLTNKDAHSFSRT

SEQ ID NO: 69711 - protein, 57 aa, Zea Mays
MGKLCLGRTNTIKATTQWEWRDGESSMYPPWQEAGRWCICALRWREPVLVLRNPVAS

SEQ ID NO: 69712 - protein, 56 aa, Zea Mays
MLVTLPASILPGHELRIEANLTSHSLTMECRPRHRSTTADLPHSLPATAAPNSGVY

SEQ ID NO: 69713 - protein, 63 aa, Zea Mays
MGCINGHGELLGTELSGSSMPQSMAANPRVTELARGRRYEISPAAEAREPPSVQDPPSAQDHQ

SEQ ID NO: 69714 - protein, 120 aa, Zea Mays
MEISSSVDCGQEKEQPTNKRPRSESTTESSTKASREKIRRDKLNERFLELGAILEPGKTPKMDKTAILSDAIRVVGELRSEAKKLKDSNENLQEKIKELKVYTISCGQVINGAVQMGGGT

SEQ ID NO: 69715 - protein, 66 aa, Zea Mays
MGAAMGANLPGGRRAGRERGSAWGLKKRETSWRCHGGELGRNRRRAEKCARASSAMGAASGGEASC

SEQ ID NO: 69716 - protein, 718 aa, Zea Mays
MGSLSPAAKDTVGVPIWQMAIEPLDDAKNTENNSSEFAVNGHTNQNDSSDSDFSNIDDGDNSEDEDGSTNTRSSYHGNDFQRMALACDDGSVRLFNVPDSGALTYYRFLPRVSGRSLSVTWSSNAKFVFSGSSDGLIRCWDSTSFHEMYRITAGLGGAGTSPELCIWTLLFLRCGTIVSGDSTGSVQFWDSRHGTLLQAHSYHKGDVNALTTVPGENRVFSAGSDGQVILYKISKDEFGATKNVVKEQVHKWVYVGYVRAHTHDVRALTMAVPICREDTSPEEKVVKIRRREKHEFSYHKWAHLGVPMLISGGDDTKLFAYSAREFTQFAPHNFCPAPQRPLIKMARDSTVNGDSVMLVQSPNWLDILLVTVQNKLTTPSTSSSRGDATVRQLARLKSKGSRKIISSAASANGTLLAYSDGVRPCLFALRHKGGKKYTLDKLELPKGLPCSQSMAFTVDSSNLILAGRNGKIYIIDIATREISNVFHPTRKADGAKISRESPITKMFLSADGQWLAAVNCYGDIYVFNLEVQRQHWFISRMNGGSVTSGGFCPKNNTLVITTSKNEVYVFDVEAKQLGEWSKRYTHQLPRSFQEFPGEVIGLSFPPQSSSSVVVYSTRAMCNIDFGLPVVEDVGLPNGSGAPAEKADAKKSKKTRQKRKARDEESTEEKRNNFNFFAFKEPVLFVGHLQDSSILMVEKRWMDVVEGFSAPVDRHIYGT

SEQ ID NO: 69717 - protein, 587 aa, Zea Mays
MASAAFKSTTRRALHATTTSRSDPPPCPRRTRSRSVSAAPRAAHEDYANTRTNPLFDSAASPSASPSPPPGAAAATGATSGRGDAAGRERGREPRLKSGGRGGGGGRARSASVAPPQRRHTASVADSAADVGGRKASRARSVADVARTYRGSETDAEARGVARKLQSWRSQHSVPEGKRKGTDASCSSQGSTTGAGCRQMDETTQSESSTVVSSPGHLEHDHSTVPVDPVLEIPPEFDPDSAEFISDISDYVTEYGKKNVVEISLESRNSAAKQHWEQMEISLEFDTDASELVSDTWHHGANQQRGELEASLEFDPDTSELAPDITEYTLKLKQSHERARKLRADLAVEEQREQELSRMLKGIVTDPNFTETHKKRPRRKSSIERLKVSRRLAEEAMNYFEECVSISTMDSTDFSSPEDPQPNSVVNVPPKSNSRFFHKGRSIFQEPHTLADQHGYHVESDKQTQCSISATGSDVSDSVIFSHTNGAGLKIRSVSSDDPDGFDTPRSRSSCFSFTHEPVKKLENCDVRQYLGNFGRGNNTELKETRSSYFADDYASQKVDPDLLKDMVTFQNRIEYGGLVICNIRTF

SEQ ID NO: 69718 - protein, 189 aa, Zea Mays
MALLRLQEQCSLLRISSSHHPNPIDIPRNPRKNQLLVPNAAKIANASEIPVPRIPTSTSKAAILARKAALWRDALVPVAAAFASCPLPSLAAEGDGKVSLESIVVAIDDFNNRNPFFVAGVVFVWLVVIPLLQEYVFKKYKPVSAIDAFRKLRDVPEVEFDEEDEKGFVKEVLARFPDPANTVVCVLDK

SEQ ID NO: 69719 - protein, 281 aa, Zea Mays
MIIMIQLPSLCCRLFRARAHKGVALGDSFVSPVDFTVSYVPLLLSVSRLDDNAAGEANKRTQTVKDQIAAGQFAASQGSWNDLLAFIDTKSGSVDVYNFLLDSGMDPVSTDSSPSSSSPSSVLQALRYSTYLGSQLGDSSAGSSNTIDGIMNGVIKEKLKIIPKDVRWVEVSNAVYYALVNDFMKPRIDEIDELLSYGVNVTVYNGQLDVICSTDGAEAWVQKLKWDGLKTFLSLPRQPLYCGPGKGTKAFVRSYKNLHFYWILGAGHFVSSCCAISVTST

SEQ ID NO: 69720 - protein, 1003 aa, Zea Mays
MARLLRALAALLVLLLAAASVAVADDGETLLEIKKSFRDGGNALYDWSGDGASPGYCSWRGVLCDNVTFAVAALNLSGLNLEGEISAAIGSLQRLVSIDLKSNGLSGQIPDEIGDCSLLETLDLSSNNLEGDIPFSMSKLKHLENLILKNNKLVGVIPSTLSQLPNLKILDLAQNKLSGEIPNLIYWNEVLQYLGLRSNSLEGSLSPDMCQLTGLWYFDVKNNSLTGAIPETIGNCTSFQVLDLSNNHLTGEIPFNIGFLQVATLSLQGNKFSGPIPSVIGLMQALAVLDLSFNELSGPIPSILGNLTYTEKLYLQGNRLTGLIPPELGNMSTLHYLELNDNLLTGFIPPDLGKLTELFELNLANNNLIGPIPENLSSCANLISFNAYGNKLNGTIPRSFHKLESLTYLNLSSNHLSGALPIEVARMRNLDTLDLSCNMITGSIPSAIGKLEHLLRLNLSKNNVAGHIPAEFGNLRSIMEIDLSYNHLSGLIPQEVGMLQNLILLKLESNNITGDVSSLIYCLSLNILNVSYNHLYGTVPTDNNFSRFSPDSFLGNPGLCGYWLHSASCTQLSNAEQMKRSSSAKASMFAAIGVGAVLLVIMLVILVVICWPHNSPVLKDVSVNKPDNLASASNNIHPKLVILHMNMALYVYDDIMRMTENLSEKYIIGYGASSTVYRCDLKNCKPIAIKKLYAHYPQSLKEFETELETVGSIKHRNLVSLQGYSLSPSGNLLFYDYMENGSLWDILHASSKKKKLDWEARLKIALGAAQGLAYLHHECSPRIIHRDVKSKNILLDKDYEAHLADFGIAKSLCVSKTHTSTYVMGTIGYIDPEYARTSRINEKSDVYSYGIVLLELLTGKKPVDDECNLHHLILSKAAENTVMETVDQDITDTCKDLGEVKKVFQLALLCSKRQPSDRPTMHEVARVLDSLVCPAGPPPKQAQAQAQAQASEKPSTTAPSYVSEYVGLRGGGGGSALSCTNSSSASDAELFMKFGEVISRSTE

SEQ ID NO: 69721 - protein, 96 aa, Zea Mays
MSTGPHYNPASKEHGAPEDENRHAGDLGNVTAGADGVANINVTDSQIPLTGPNSIIGRAVVVHADPDDLGKGGHELSKSTGNAGGRVACGIIGLQG

SEQ ID NO: 69722 - protein, 113 aa, Zea Mays
MANRGRGNGSRGSGNSRGCGQRGRVQVCGRGNDPPKQRNGGRPQRSDAASGSHDLLLCQICFKTGHRVSRCWHRFDENYVPEERHINVAIAMNAYNVDTNWYTNTGATDHVTK

SEQ ID NO: 69723 - protein, 92 aa, Zea Mays
MVIRSGHGGWGEGLVGTSFFSFDASCRNCKRYDIFAPAVMCVSCRLDLGCIRFRRRPWLGLGLALFWLPVQTGEPFDASLSLNDPGLTQCLT

SEQ ID NO: 69724 - protein, 1245 aa, Zea Mays
MLPEHKSAVPPTLEGHEASEVQLLQSDITVELSSSKHSEYTVQHVFGSTEDTISNISSSIPAAPPYPIFHIVTYNSSGSISAEQVNCEQALDQTALPIHLRPFKVEISQSETTNGLLASKTDDKEHGGLPIPSLPQNLPQPREHMKPPSPPPPPPRPPPCHATLVPSLCLSSNPPSLRELYENQPSTSPPPFPRESFVALPPPPAPHPNHLSLPGKHIKPSPPPPPPPPRENEAFCPSTLLSPTRHVIPPPPTLHHIAPTSPCLYQPSFPIDIEIQPTFSEDIVIVSPSHSTEVNIVPLPPPPPRRMSEILSQPLEGGQSALPASLLEVTKEIPPPPPLPPKVQRRSPLSTLCGGIVNIPLPPPPPPPPLPGGHGEVPLSTPKGSGAIPPPPPFTKGLGGITLAIQFHSGDFSLLEPTRESESTSRLPPPPLSSNGHIGDPPPPPPPPPTMSVFVEASIPLPPQTGCREAPPPPPPSPGGHVEFPPPPPGECALALPHPKASVGAPPPPPPPGGHVESPPPPPPPGECALALPHPKASVGAPPPPPPPGGHVESPPPPPPPGECALALPHPRASVGAPPPPPPPGGHVESPPPPPPPGECALALPHPKASVGAPPPPPPPGGHVESPPPPPPPGECALALPHPKASVGAPPPPPPPGGYVGAPPPPPPPGECALALPHPKASVGAPPPPPPPGGYVGAPSPPPPPGGYIGAPPPLPYGGIGGVPPPPPPFGGLGGTPPPPPPAGFRGGAPAPPPPPGGHGGPPPPPPRGHGGVGGPPPPPGAPSPPMPPGMPGGPPPPPGGRGMPAPPGGRGHGLARSLGPTLQSAVRRSSLKPLHWVKVTRAMQGSLWAELQKQVDANSRAEFDVNELESLFTIAPKTKAGPKSEGRGKSLGTKSDKVQLIDLRRANNTEIMLTKIKMPLPDMMSAALALDDSVLDADQIENLIKFCPTKEEMELLKNYSGDKEALGKCEHFFLELMKVPRVESKLQIFAFKIQFQSQIRDVRKNLQTVSSACEELRSSEKLKVIMKNILLIGNTLNQGTPRGQAVGFRLDSLLKLIDTRATSGRMTLMHFLCKSLAEKSPEVMDFHEELVNLEASSKLQLKALADEQLAVVKGLEKVEQELTASESDGPVSDVFRKTLKEFIDCSSADVRSLSAFYSEVGKSADGLAVYFGEDPAKFPFEQVATTLLTFVGLFRKAHDENLKQIEAEKKKAQKEAEKEANQDKTPVKSKNGNADKSPRSPSTF

SEQ ID NO: 69725 - protein, 448 aa, Zea Mays
MAAPSPLPRFLILLLAVTSSAFAAAAATGAPVVGEDYVRPPPARCHRKALLSLFPWSKKEESAASSDPQQVHISLAGEKHMRITWVTNDNSVPSVVDYGTKESTYTMKSQGESTSYSYLLYSSGKIHHVVIGPLEDNTIYYYRCGGQGPEFQFKTPPSQFPLSLAVVGDLGQTSWTTSTLNHIKQCEHDMLLLPGDLSYADYMQHLWDSFGTLVEPLASNRPWMVTEGNHEKEHIPFFESGFQSYNARWKMPYEESGSRSNLYYSFEVAGAHIIMLGSYTDYDDSSDQYAWLKADLAKVDRKRTPWLIVLLHVPWYNSNWAHQGEGDSMMASMEPLLYAAHVDMERVYNSRPDPCGAVHITIGDGGNREGLARRYRNPKPAWSVFREASFGHGELKIVNSTHAHWTWHRNDDEEPVRTDDVWINSLAGSGCIQEGSRDRESRKILMSP

SEQ ID NO: 69726 - protein, 445 aa, Zea Mays
MEYAKFLQDTAKEMAKEVQTSRSGEMKQTAEDLDEFLNKVRKGGHASNDEILSFAKLFNDELTLDNMSRPRLVNMCKYMGIQPFGTDHYLRFMLRKKLQDIKNDDKMIQAEGVESLSEYELRQACRERGHLGLLSTEEMRQQLRDWLDLSLNHSVPSSLLILSRAFTVSGKMKPEEAVVATLSSLPDEVVDTVGTVLPSEDSVSERKRKLEFLEMQEELIKEEEKRQEKDDKAKLEEPKATEEDLALKEMTEPTVREKEELKKAKTHDKKEQLCNISQALAVLASVSSVTKERQEFLSLVNKEIELYNNMLAKEGTDGEEEARRAYKAAREESDHAAEAAVGEKVSSALIDRVDAMLQKLEKEIDDVDARIGNRWQLLDRDCDGKVTPEEVAAAANYLKDTIGAEGVQELISNLSKDNEGNILVEDIVKLASQTEENNEAEETAR

SEQ ID NO: 69727 - protein, 67 aa, Zea Mays
MSQIKYGTYCHTLTGCHHISLGGTQQAYVFNRLTPQVQDRLSLPQSGQHEQLQQDSWNTRQKGRSIR

SEQ ID NO: 69728 - protein, 863 aa, Zea Mays
MIDDEESQGIKKVHFRDSFSQHPIVTYKRRRQQKPQTQQQLRQPPPSLQQHPEPQLQVKLEPKTEDVPEQQFPILRARDIGWEHAVDLDGNKRRWQCKFCSLCRSGGVTTLKAHLIDDSCPNVPKEISKKVSNFIEEKRATRLLLNNYVFNVDEDFNTILQEGTVEYVNEQQPSRKATYVQTLSKCAINEIAAGSKQCGAECSGQPVEHCDQPEEQCTMDYGRMDRLTSNKNQILDKNTENSKNTKMLKPCRKSEFNTRKHIIIVDKIGRHWKCRYCGMDVYGKKFQLHYHLAGAFRQAKCPNVPREVFAKARQHVLTKKMLKKSKAEQQIPSSPHILAQSGEERQNNDPFCGNQSQLSINNEPREPMMEGPHDNGLCGDTNQLEEQKSGFGISDCWRYVLDGQMHLPDVQEGAGIGTCIRDALLYGCAEFGTVPDKMEMDCDKTVDANTAKCQNILKDVLRSENFALLCSVLCRTVHQDGERTRYFDFGVIDSRMKNGNYGPEPELFVHDLKLLWEDLKVAGQDIVHLANNLSSLTEDSYEKLVGRERGSDDDELNEAVVARSEPKNLVQPNASVPLTSQGFNQLLDQPGPSDPSVVYKDSICNRCGKVAGAGSVLKCYRCMLPCHISCIEATGSPISTGRWCCKNCSAGTKEPVEGDMVLAHGNPNCLHESCVVCDRLAACRSPKCDNSRALVISSVDPEIDTCYSCKICGGTEEDEKRFLICGNVLCRYMYYHIGCLKSMQISTSVERGSPCWYCPSCLCRVCLCDKDDDLTILCDGCDEAYHIYCITPRHTSIPKGQWYCSSCSVERAEEGMRQYERRTLKLHRKEDAGLQSWNFDGVDLLLSAAEQLRIDEQLETRTD

SEQ ID NO: 69729 - protein, 93 aa, Zea Mays
MMKQRGGNGTGASGAATAVLLLALLVLAASQADGAAAARRLGVGVADDVIPHNNGCTSDPNSLGPPCHGQSPPGRKLLAAEQADPSPATGKLV

SEQ ID NO: 69730 - protein, 699 aa, Zea Mays
MASTPTPSEGDCPPEFREAVSTLIFAAARYPDLPELCDLRHIFTERYGNFVEHFVSQEFIRKLDSTEFTNEERFQVMQSVAEELSVSFDAKELELKLWASLQTEHDMLEKGSRKPAELAMPSSSKQICVENASCEEQEDILEKSLTRPTEPAMSLFDKTKYNGDAPCERKNKDMLENYSTKPIELATASSNKQKVTENVPGKRNYDAEPAHHTEKVEIQLVQKDIQSVADAHHTIDENSRKQQPYVSDEKEHLQKPVSPVDTNRTQKDVQKLNRRAVRHLEKELMEAVELDLNGLPKFGFGAVRFPEAEGNKTVQLNVKPNEAVRDFHIEKENDEVLHCSRLPGGSEHNGGHADSGLRAQGLENQGHPVSPLSGNTRKKAPYTKLNAVNIKNPTEKQANNGFLHDKPQHLADLGYPVQKGQGDPERALTMLPPYVEPKSNMQPVNDDPEKQTPSGYRKPNIPGQTDHLENKNVLRPVSVRRRTAKLPAPVDAYVEVPNNAKVTSQTPKSHRSHSSRRNGAKDDQNRKCNGTDDVGSETNAQITPSSQSKHVGRRNGALNHKNNSGRLMQRMQPEAAETAIDCGNLLPRNANGQMRHNSGRGGDMDEEERMMDKLLMHYSKKGSDLTNNETHTDAAQKVSLHPTGRAISLPPESVGPSKDAKVPARCTSLQPEGPRSAHVHPKMPDFDELAARVKALRKA

SEQ ID NO: 69731 - protein, 153 aa, Zea Mays
MDNLKTHSEYADQPQGPQANAVSFALPTGQVLDLDSHMIGQQHTNLSSFWFSLEQHRLQLDQALQLHNQQLQVSLQQQISMQNSTLLNLVESMTRDVLMQKNDEIASLRVELQRNQEDLETTLHDRDEWMKMLQVIVKHRAWRGQHWRQHSPI

SEQ ID NO: 69732 - protein, 119 aa, Zea Mays
MEPTLVATACMSMKPSRDLITAVASVVTGVVAEGGVAASVVAEEGGVTGGVVVAVGVDLEAVVEGVTEAVVEGVRLSDRPLVQLVQERRPPLVMTIEDPWLAIIVKNANYIVPFRPIVI

SEQ ID NO: 69733 - protein, 67 aa, Zea Mays
MGILLVIPRMLMREGSYSQILCTTQLLISTMSSNLLSLEIVEQLYQTMPSHCHNHGDECSFPSYGQP

SEQ ID NO: 69734 - protein, 64 aa, Zea Mays
MVFCSSVRPLGSLGFNSQSRRLFHRLASSIPPVSVVASRVQLYIHHPRVSSSFRASAKKNPRIG

SEQ ID NO: 69735 - protein, 230 aa, Zea Mays
MRTRQTVRFKNELERNITIKLGYANAKIYKCEDDRCPRPMCYKAYGSGKEDSPLCDVPGFENTRMKLLRHVSFVDCPGHDILMATMLNGAAIMDGALLLIAANESCPQPQTSEHLAAVEIMRLQHIIILQNKIDLIQESAAMNQHEAIQKFIQGTIAEGAPVVPISAQLKYNIDVICEYLVKKIPIPERNFTSPPNMIVIRSFDVNKPGSEVDEIRGGVAGGSILRVCTS

SEQ ID NO: 69736 - protein, 87 aa, Zea Mays
MPNAPRPPRTRCRPARCCAGEAGLERRACRSSRAASRARRHPSHATPRCRMHRPSPTTTPVVRSCLGLIENHCDCFFFSIILSLVIL

SEQ ID NO: 69737 - protein, 370 aa, Zea Mays
MWYGSFPTKGKYCHEMALRILLASIESHANRYKRYIVPVLSVFMDFYIRVFVRVFTSASEIKNTPLKLSYIYQCVGCDSFHLQCLARTVPKKNNGVKHAPAFGPVVPQECSDCGKKFNVGGPIWSAPIHDQDWVVSTLTGVKSMKDRYPAYDKITSVLTTVSEELDDIPLFFSLHNIAGTVKCTSPSLVMFRSAVLNAGYRISSTHVNPLGVKSDAPWDVIWDIMRCWVKNHPIKEQARDSPGTVILSKSPKLEADFSRAVAALGKSGAKKTKRFLPNPERHWGPKVRAGRKITSKHVSLLGPDAINAAVNGGGGGDCHREGSGAAPDSSNTAPEPEGLEDEPSNKRQKASGDGEPEGQKASDGEPASEA

SEQ ID NO: 69738 - protein, 938 aa, Zea Mays
MMIIIWWILMHRRTRRVTQIQQGKQMASDAIHPMPKVVDQSTKCSTSFGEVDNDSHGYVQNHDKGGAKSRDKCSTAKKLFADTTAEDGEKNSRCLAGLSYAGSQEPGDLSQANAFDVVDRLISINCGLSSQETIPNKLEIAKPHASSKRGTLMLAEKVDLGRSSNGKAEIFEFVDNLEDEGGGDFFSKNRDILLPKPIGRGEPKSHYTRAKKPSTKKSCGENKIGEAMNKRNSKLPGRLETIPLSHSRLFKSDVKSKQAYGSRTKKNLLKDLDNLSNAKSLEEQERADVALNDVGPDTQMAVEAMEALVQCSPAKSLSAEDQPLLNRDTMAEKSGIAKSHLKNGSQRTSNIQEGVTTRSKRRKVPDFSTKPQKERLRGSKVQESSEPIVKVKHKQTKSVPEKSKVSKEFIDENKYHGTPIAHRTRHCGRNDPSAFIEFSNKHLRRGKKLTGDSSTIQQVQNNRIAIESGLSYFEKESTEQICTNNDQDLQQSKDGSTQRTSVNNAQNLETHRVEPTTDVTCRDIPLHPKRRRTPTKLILSTSAAAANHEIPSEVARPYKKRRIFVRSVSDLLKYAKREPSHGRSASMLSSILEKSLAASPVLNFSVCGDSKTSSDVISSAQRPKESSHDEDTSKSPENNPQVPNRSMKTPSKVVNELSPTFSPANPSKGSSRNLSKASVARELLKLDPENVLPNQQRKDSRRRKDMAHVSILLSHHLDDDVVKRQKKILARLRGSEAFSMADATHFVADRFCRTKNMLEAITIGKPIVTSMWLENCGEAGCFIDERKYILRDEKKEKEIGFSMPISLASACNHPLLLGKRVFVTSNVKPSQAVVTSLVKASSGQPLERVGRSIMNEKEVAPDLLVISCEEDYQTCAPLLEKGASVFSVEFLLNGIVIQKLEYERHRLFLDRVKQTRSSRWLKDTVQDRFVPVPKRRRR

SEQ ID NO: 69739 - protein, 280 aa, Zea Mays
MRLMVLWTRLGSIRKDSLRIHTILLLRNEYEQKMKEKGEQPIMFSHLAPPKRRPTGDEDGRANPKPEDSVYYHPTLNPSGAPPPGKPPMYKSSIGPRIPPPSSSSTGASSSMSESEAGPTTLPPPPPPPPLPDTSESIDPPAPPFPLPPLPPLPPPPPKPNSDAALPGLPLPPPGPPLRESVSGHTVLPPPLPPSQRSSNPPPASSANESKTDSAWVSTLDLFCIFTSASNPFVNASNPFPYCSNVWILAFVTLSDVTLFAALSCVASTTPATWVVTKII

SEQ ID NO: 69740 - protein, 274 aa, Zea Mays
MTRVIHDSGDGMQKEALDLVSSDVNFPKGCFPDYRIGPNNQIIDPEETHEAVPLKEVVAKETAQLLEQHRRLSVRDLKEKFEKGLSSASKLSEEAKRREAASLDRQVLLKKLRDVLDTLKGRVAGRNKDDAEEAISLVEALAVQLTQREGELIYEKAEVKKLANFLKQVVVTQMNGKDYSSNSVHVFHIGKLRIKLQKGWSTKARELYSTTMKLCGSRGGGNAAARAVFWQARKGLSYTLAFETDRDRNAAIMIARKFASNCNIALAGPGDQDT

SEQ ID NO: 69741 - protein, 1257 aa, Zea Mays
MSSLQLLQLTERGRNLLSSRRRTLAIVSGAVLAGGALAYAQSGRWKKHQEANSCSDANSHSSNNGRTSQNGIDGKLVKTRKKKSGLKSLHFLAAILLKKIGPNGTNYLIGLILTAVLRTAVGHRLAKVQGYLFRSAFLRRIPTFTRLIIENLLLCFLQSTLYQTSKYLTGSLGLRFKKILTDLVHADYFENMVYYKISHVDHRITNPEQRIASDIPKFCSELSDLVQDDLAAIVEGLIYIWRLCSYASPKYVLWILAYVIGAGGTIRKFSPAFGKLKSTEQQLEGEYRQLHSRLRTHAESVAFYGGRAEMLSNLRYHTSVIISLFQSLGTISISSRRLNILSGYANRIHELLDVSRELSGGRDRLITQNSSDGNYISEANYIEFSDVKVVTPSGNVLVDNLNLHLESGSNLLITGPNGSGKSSLFRVLGGLWPMVSGHIVKPGVGSNLNKEIFYVPQRPYTAVGTLRDQLIYPLTADQETEPLSYGGMVDLLKNVDLEYLLERYPLDKEVNWGDELSLGEQQRLGMARLFYHKPKFAILDECTSAVTTDMEERFCKRVRAMGTSCITISHRPALVAFHEIVLSLDGEGGWDIQDNRNGSFSPEVEFDVLKASESDRKSDALTVQRAFITSTKGNASMKPKKHSYSTEVIASSPSMEIEHTVQSSIVTQLQCSPRPLPVRVAAMSQILVPKLFDKQGGQLLAVVLLVFSRTWISDRIASLNGTSVKYVLEQDKAAFIRLAGTSVLQSAANSIVSPSLRNLTSRIALGWRIRMTNHLLQYYLKRNAFYKVFNISGMSMDADQRMTHDVEKLTNDLAGLLTGMVKPLVDIIWFTWRMKLLSGRRGVAILYAYMFLGLGFLRAVSPDFGDLANQEQELEGTFRFMHSRLRTHAESIAFFGGGSREKAMIDAKFMTLLNHSKVLLRKKWLYGIFDDFVTKQLPHNVTWGLSMLYALEHKGDRALTSTQGELAHALRFLASVVSQSFIAFGDILELHKKFLELSGGINRIFELEELLQASQSNPVMPSDATNAGSEEIISFRGVNIVTPSQKLLASQLSCDVSQGKSLLVTGPNGSGKSSIFRVLRGLWPIASGSLSKPSEGIFNVPQRPYTCLGTLRDQIIYPLSHEEAKLKMLSGETSDKSTASELLDDHLRTILENVRLLYLLEREGWDATTNWEDTLSLGEQQRLGMARLFFHCPKYGILDECTNATSVDVEEHLYRLATNMGITVITSSQRPALIPFHSLELKLIDGEGKWELCSIHQ

SEQ ID NO: 69742 - protein, 101 aa, Zea Mays
MAATAGGGGGGGAKAAVTEQIAQAVRSTSNLLQLMEQSSPAQVLHQLPQVISSLDAYMDRSLQSASQIKTVTQLLSNMENTQLRYMLPSSQKKKDQKSTEP

SEQ ID NO: 69743 - protein, 138 aa, Zea Mays
MIFPFSGSYVSTTLAGSHNKSILGRFTYLFIVLQEHCVIESKPDHFLDDLRLHNPWTELKQFAKSIDINDKDPVVHKHTPYIVVLVRLAEKWADAHDGNMPSTRQEKKEFKMKKITKKLWTHHIKSQSLQESVMRSIR

SEQ ID NO: 69744 - protein, 233 aa, Zea Mays
MRRTVRQTTSPKDGLESMTIWLDKDSKQLLQWPVEEIESLRGKQVRHQGLELRKGDLFEIKEIDTLQADVEIDFELTSIGSADPFDPSWLLDIEKQCREAGASAHGPFGLVVLASESMEEHTSVHFRVYYRSQEKHMVLMCADLRKSSLRPELYTPAYGGFFELDLEKEKTVVSLRTLSFGGGGRVCIMARVYPAALVDDGGTRMYAFNNGTSTVRVPRLEAWSMRRAQVNKG

SEQ ID NO: 69745 - protein, 586 aa, Zea Mays
METKPEPHRQNHVRHEEAQEGEQAAVMEHGALSLQRGVTNLFGRRHDEKQAVGRRGEIREVDFFSRVSRPRDQDSGGGGGRGVSGGGRDDVYCLFVQIELDLLTTTTAATTCAGDEVMQTKNQKIEASAVEAELRRVVEENRRLRGILEELTRSYGALYQQLLLVTQGQHHQHRLHPADLMISRPSLAHTHLTSTAASQYSASTRLLLEARASSSAVAQPRAVEDEVVSGAGDGAGVVEASPSLSNGGNNDNDAAAADGKRKTSPPRESGEQAAASSELPGRKARVSVRARSEAPMISDGCQWRKYGQKMAKGNPCPRAYYRCTMAVACPVRKQVQRCAEDKTILVTTYEGHHNHPLPPAATTMANTTSAAAAMLLSGPATSRDGAAALLGHPAAALFHHSSSSIPYASTMATLSASAPFPTITLDLTQQAPGGLLPHGLHRPPGGMHPVVAAPAAAMPFPAPSPLAMFLPQRAPTVPTGLPVAPRQQQQQQSVMETVTAAIAADPNFTTALAAAISSVMAGAAHQAQQPTPRASNIIGIPGDEANGGSAGAATAGPSPTTTAAGAHAASGGSPRFATQSCTTSTT

SEQ ID NO: 69746 - protein, 367 aa, Zea Mays
MQASDLLLAKAWFHSTQPMTRSRSSELRRRYAAMQTNMTPITIGSIEAINQLKQDFTTTTNSIPMSNTPVQTPNFASPSSSSTSHLDNPHMAAQDTVTSVVSMLKDTLERKKLGSHANKDTSVGHPFGFYDTQQFQQNILGGTDFFPIMTTAQAQDSLMLPKVERPMEPNNGSFVPSTNQVWFGAASREPSHSGSSTAMTTYSAGFEMCDELPPAGQAMSICESSRKNAANGTTIGRSKGKEYRERVQQDNLKDERKMSSTNTSGASKADNGDPMKKRRVERSRKMAEAKERSSTPVIPSDMQAVLKRCETLEKEVRSLKLNLSFMNRKDSEQTKQIEELQQKNEDLAEEKERLLEEIERIVSDPNT

SEQ ID NO: 69747 - protein, 179 aa, Zea Mays
MSKCRTVVLFRCDWFDTYSKKVRMKDDGYFRSINHGSCWYKDDPFILSTQATKVFYLDDTKHCESWRIVQKFTHRHLWNVTENENEETPMGLGLSYQDEICAGFHVQVNEGNLNDEVPDSEDCHHVNTSLVDEFRKPRQDNVQGDGTSDDEDETIWQYVSDDESPTILVEDDDDDSDAE

SEQ ID NO: 69748 - protein, 100 aa, Zea Mays
MASATGVSSSEMAVDHATGPGAVDKPRFDALTPNEMSGGRPQFRKVPVPQHRFAPLKRCWMEIYTPVYEHMKIDIRMNLKARRVELKTRQDTPDVSNLQK

SEQ ID NO: 69749 - protein, 381 aa, Zea Mays
MMEVSPSPEQGVMAGREPFGLPKTPATPPSSGGTQGLRMAYTTDGTAIFTPVSSVPPATATYQPVGGSAASASSLAGVGGNGGAPVHSGGAGEPGTKKKRGRPRKYGPDGSMSLALVPASMAGEPAPAALGASGPFSPNGPKAPNTAPSASPDGAKKRGRPKGSTNKKHVAALGNIGPAGAGFTPHLIFVKAGEDVSAKIMSFSQHGTRAVCILSANGAISNVTLRQSATSGGTVTYEGRFEILSLSGSFLLSENGGQRSRTGGLSVSLAGPDGRVLGGCVAGLLTAASPVQIVVGSFDAGGKKQPKQQQQQQLAPSPAPLNLAPTGVAAGPSSPPSRGTLSLSESSSGAPPSPPHAGASGGHGQQQQQPQPGGFSGLFWK

SEQ ID NO: 69750 - protein, 922 aa, Zea Mays
MGTIRADHDDFSIRFASAMDQMIRLKSSDGVYNDWSRDIKGNMYDIVVEGFQLLSRWTGRIWEQCAWKFSRPISDSQQNSMTCFDYEKVVRYNYTAEERRALLELIGYIKSIGLMMQHCDTLVSEALWETIHMEVQDFVQDKLDTMLRTTFRKKKDLSRILSDMRTLSADWMASTSKADPEQHSLHQETEEMRQNTFYPRPVAPTAAQIHCLQFLICELVSGGNLRKVGGLFGNSGSGIPVEDLKQLETFFYKLSFFLHILDYTATIGTLTDLGFLWFREFYLESSRVIQFPIECSLPWMLVGHVIESEDAGLLESILIPFDLYNDSAQHALTSLKQRFLYDEIEAEADLCFDLLAQKLNEIIFTYYKSCAASTLLDSSFTYACDDGDKYFVKPLRFDAIFKLRRVMVLGRTIDLRSIITQRMNKIFRENIDFLLERFENGDLCGVVELQQLLDILELTHQSISRFLELDSYSLMLSEMQENLSLVSYSSRISSQIWSEMQTDFLPNFILCNTTQRFVRSAKGTHHSSHRSSASTGKPYFYCGSHGLAGLYRDFFGVPHMFAVVKLLGSRSLPAIIRALLDHISSKITGLLPKINALQEALPKSIGLLSFDGGIAGCQKIVHEILTWEAKSEVKTEVLHDLKEIGSALYWMSILDIVLRQIDTTQFMQSAPWLGLVPGNDGQVKHAYSDNTPFTTLLSAASNAVTSSPTCPNPSTFLVMSKQAEAASLLYKSNLNSGSVLEYALAFTSAALDRHYSKWSATPKTGFIDITTSKDFYRIFSGLQYSYLEDSINNPSKKQEMLGDSVAWAGCTIMYLLGQQQHFELFDFSYQFLNVAEVESATVSHYQSSERTKSSNFLQGYEGILEAMRKARRLNNHVFSMLRARCPLEDKVACAIKPSGAPLHRMKFMNTVSAFETLPQRVT

SEQ ID NO: 69751 - protein, 736 aa, Zea Mays
MAAPRPPPLGALGGVVGGSGGAAPAAGAPAGVSMRMFHGESFLGEMEVFPMKRDGEGGLPFPTNEIRVSHFSPASERCPPLAILQTIAPFSVRCKLQTKLTPPNPGLQRLYLTCFNEFKSAVVVVGDEELHLVAMPTKSGKVPCFWCCSARSGLYAASVGMLNLRCLAIVFDLDETLIVANTMKSFEDRIEMLSRRMDVEDDPIRIAGMSAEIKRYIEDKELLKEFIDMDTVTDNGKIVGTQKEEVQPMSGGQERVFRPVIRLPDRNAILTRINPENRDTSVFVKLRPAWEELRSYLTAKGRKRFEVYVCTMAERDYALEMWRLLDPEGNLISPQQLSERVNCVKSGSKKSLQNVFRDRRCHPKMAMVIDDRLNVWDDKDQHRVHVVPAYIPYYAPQAEMANAVPVLCVARNVACNVRGGFFREFDENLLRKVFELYYENGLLDLPYAPDVGDYLVCEDTSFVPGNKDQAPIPEGMRGTEVEKRLNGQSYRWEQREGQQMPSSIRSPDDEGMPIRGTGGVRNIQPNGGSLAITPSVYVTVLQEIGRLCDSKVEFRSTVSSVRSMLFSVEVLFNNEKIGIGVGKTRDEAQVQAAEKALQNLENSYLSSGAPVAGVPKKDSRKSPGRSGNGFLEDATCSDNDISMREPSGSALKLDHSNNVDTLSSIMSLIREHCLEDQHVVFRDEVQNSSPARNEEYHFQVELAGLILGRGVGSDREAAKLLDLRGVRLRLRRPNCS

SEQ ID NO: 69752 - protein, 526 aa, Zea Mays
MDMNNGWLGFSLSPSAASRGGYGYGDGGGGASASACGDGEGSCPSPAAAASPLPLVAMPLDDSLHYSSAPDWRHGAAEAKGPKLEDFMSITCSNKSSGRSLYDSCGHHDDEQASKYHEVHGIHPLSCGSYYHGCISSGGGGGGGIGLGINMNAPPCTGGFPDHQHHQFVPSSHHGQYFLGAPAASAGPPAGAAMPMYNAGGGSVVGGSMSISGIKSWLREAMYVPPERPAAAALSLAVTDDVPPAEPPQLLPAPLPVHRKPAQTFGQRTSQFRGVTRHRWTGRYEAHLWDNTCRKEGQTRKGRQVYLGGYDREEKAARAYDLAALKYWGPSTHINFPLSHYEKELEEMKHMSRQEFIAHLRRHHQHGRWQARIGRVAGNKDLYLGTFSTQEEAAEAYDIAAIKFRGLNAVTNFDISKYDVKRICASTHLIGGGDACRRSPTRPPDAAPALAGGADRSSDAPGDQAASDNSDTSDGHRGAHLLHGLQYGHPMKLEAGEGSSWMAAAAAARPVPGVHQLPMFALWNDC

SEQ ID NO: 69753 - protein, 403 aa, Zea Mays
MRQWMLRITSYADRLLEDLNDLDWPESIKEMQRNWIGRSKGAELIFSAVDQEGHDLGATLLVYTTRPDTIFGATYLVVAPEHVLLSSLTSEEQRAHVEEYRELSARKSELERTELQKEKTGVFSGSYAKNPATGEIIPIWVADYVLGSYGTGAIMAVPAHDSRDHEFAVKYELPIIKVVSPPNGNCDPVEAYEDDGIMINSSSSSSGLNINGMLSQDAAKKVTEWIENNGFGKKKVNYKLRDWLFARQRYWGEPFPVSYLDDTNEMVPLTEDDLPLTLPELDDFTPTGTGEPPLTKATNWVRTIDPSSGKPARRETSTMPQWAGSCWYYLRFMDPKNCSILVDKAKERYWGPVDIYVGGAEHSVLHLLYARFWHKVLYDMGVVSTKEPFKCLINQGLILGERQ

SEQ ID NO: 69754 - protein, 50 aa, Zea Mays
MICSSFENSRIPYICACTRTFAECINRVINRLGVPLSLLPWRRASCSSCC

SEQ ID NO: 69755 - protein, 575 aa, Zea Mays
MRTMVKEQQKSSRRYGVIKCDPLVRQGLDRTAKHMVIPYMPMLIPPICWTGYDKGAHLFLPSYVMRTHGARQQRDAVKRAPREQMQFVFEALNTLGSTKWRVNKRVLSIVDRIWSNGGRLADLVDRTDVPVPEKPDTEDETLLKNWKWHLRAAKKKNSERHSQRCDVELKLAVARKMKDEEGFYYPHNLDFRGRAYPMHPYLNHLGSDLCRGVLEFAEGRPLGKSGLRWLKIHLANLYAAGVDKLSYDGRIAFAENHLEEIFDSADRPLEGRRWWLGAEDPFQCLAVCMNLTEALRSSSPETTISHIPVHQDGSCNGLQHYAALGKDKLGAIAVNLVAGEKPADVYTGIANRVMEIMRMDAQKDPSVEPDAARARLIVDQVDRKLVKQTVMTSVYGVTYIGAREQIRRRLKERGVIPNDSELFGASCYAAKVTLTALGEMFQAARSIMNWLGDCAKVLTLQRETDKVMVKRQRTAFPPNFVHSLDGSHMMMTAVACKRQGLNFAGVHDSYWTHASDVDTMNKILREKFVELYDTPILENLLESFEKSFPKLKFPPLPERGDFDMKEVLESTYFFN

SEQ ID NO: 69756 - protein, 309 aa, Zea Mays
MNATRLGDRFALKLPCGLIQGSSITIIGTPGGLLGNFKIELTGAAVPGEPDPPIVLHYNVRLLGDKLTEDPVIVQNTWTISDDWGSENRCPSPDSDAKDTTKVDDLEKCSSMVGEDQKEILPSKFHSNVSAMPPASKKKAEPRKYFPFRQGYLAVAILRIGAHGIHMTVDGKHITSFAFREDLEPGFVGEVRIAGDIKLLSVIASGLPTTEDFEHVTDLEILKAPPVPMDKPVDLFIGVFSTANNFKRRMAVRRTWMQYDSVRSGKVTVRFFVGLVRIKLWRWTAILCTKMSWSMRNSGMKHEHMETSS

SEQ ID NO: 69757 - protein, 258 aa, Zea Mays
MAFFISCDPDDVMRQAEESTLRYQRGAPLSALDGVLVGVKDEIDCLPYPTTGGTRWLGAARRCEADAACVAQLRACGAVLAGKANMHELGAGTSGINPHHGSTRNPYNASTIAGGSSSGSAAIVCAGLCPVALGVDGGGSVRMPAALCGVVGFKPTAGRLSNAGVLPLNWTVGMPGILAGTVEDALIAYSAIVDQSQPSYLRPELNLPQLGSTLSIGNIKLARYGKWFNDSAEDIRSCCDKALQALRANYGWQVRPAA

SEQ ID NO: 69758 - protein, 639 aa, Zea Mays
MPAFGVAQFGSMQKFLDQVKGATFLMESLSWSPSTKDAQKDAFMYNPQFQLDSSTTREGLPRTKAEPENSRLENAISIDSLKNFAITSNGLNPHVVAMPVNSKSISTVKLIQSDSNLRYNNISENAQQFKSAKQPDSSWASAATCFSNLTNLQRIERGLSCTPNKLRHCLQSEKSSGFLDSYSSIVSTDAELKCTLFDNATPFVQSDVIQEVGTSGSTRACGLHELPNEIWAEIASGEMKPVIKEVNENNGFLESTAFDPVMNDWWGDTALLAGNTSHLSATTMNSVSGQASSEQLSIEDRGLFSESVFEELLGFDGNVGPVMDSTEPLAGFVSGCHLPRYNLQGSLSVCKAQVPPLILPSGSCTSENVVMGSSKEAPVSLQNLSMDDCGSLNTASSKISQVKKPEGEKVVKKRARPGESTRPRPKDRQQIQERVKELREIVPNSAKCSIDALLDRTIKHMLFLQSVTKYAEKIKQADEPNMISKDNGSVLNDNSHGVVLKDNPSGGSNGGATWAYEVAGQTMVCPIIVEDLAPPGQMLVEMLCEERGFFLEIADTIRGFGLTILKGLMELRDGKIMARFLVEANKNVTRMDIFLSLVQLLQQNSRNRSSDQLVKVMNNGIPSFVDHQQSPASIPVWPC

SEQ ID NO: 69759 - protein, 820 aa, Zea Mays
MVTPPTVEQEDEEMLVPRQEAVDTDAAQPMEVVAQTEVVSTAESQPVEDPQTSRFTWTIENFTRFSEKKHYLEVFVVGGFKWSVLIFPPVLQLQLKRFEYDYMRDSMVKINDRYEFPLQLDLDRDGGKYIAPNADRSTRNLYTLHSVLVHSGGVHGGHYYAFIRPTLSEQWYKFDDERVTKEDAKKALEEQYGGDEELPQINPGFNNAPFKFTKYSNAYMLVYIRESAKEKIMCTVDEKDIAEHLRVRLKKEQEEKEHKKKEKAEAHLYTIIKVARDEDLKEQIGKGIYFDLVDHEKVHNFRIQKQMPFSCFKEEVAKEYGIPVQFQRFWLWAKRQNHTYRPNRPLTVHEETQSVGQLREISNKAHNVELKLFLEVELGLDLRPLPPPEKGKEDILLFFKFYNPEKEELCFMGRLFVKALGKPSEILAKLNEMAGFPPDQEIELFEEIKFEPNVMCETIDKKLTFHYSQLEDGDIICFQKSPGAEYDAPVRYPDVPSFLEYVHNRQVVHFRSLEKPKDDDFSLELSKLHTYDDVVERVARQLELDDPAKIRLTPHNCYSQQPKPQPVKYRGVVHLSDMLIHYNQTSDILYYEVLDIPLPELQFLKTLKVAFHHPTKDEVVIHSIRLPKNSTIADVIYDLKTKVELSSPNAELRVLEVFYHKIYKIFPLHEKIENINDQYWTLRAEEIPEEEKNIGPNDRLIHVYHFKKDINQTQQIQNFGDPFVLVVHEGETLAEVKKRIQSKLQVSADEFSKWKFAFISMNRPDYLQDSDVVPTGFQRREVYGAWEQYLGIEHADTAPKRVYTVNQNRHAYEKPVKIYN

SEQ ID NO: 69760 - protein, 728 aa, Zea Mays
MAREGEERKEQRIRAVLKLLKSWVMLLYFSLKKNLTRKKGDASLARHCILKAMNADPEDVDLKYLCGYMYHNLCEYQKAAEIYEQIVRIYPANSAVRKVAAQMYRECGQIDNAINLLKDYADTQTFNIDWSVLDLLISLYLRNNVFSEALKQIKRAQLHLGSQQKLPVQLQAKEVICHAYCGDMKHAEIFLRDVRLEPSKENIDVLKELASNLEKMGRYEYAVKFYLLIENVATQNDGGLCFDHKEMGSWYVKAAQCYMILGDKKNAIPYFYKALQSMKDNIGIRLTLSSLLIDDDKTDEAATLLSPPKIPELQSANTPDQQKPWWCDGKVKMALAKLYYNKGNLEDFVDTIFHPILETLNVEYANRKVKSMRKLPNIVLHERVKVLGEQRPDSVFQGLRPIASPDELQKANRAKKLIEKRTAANEELKHDYLPRTKQVPPVPGLLTNVEHHQLVLNLCRTLALLQRYWDALQIINRTLKLGNDALTGDKKEELRSLGAQIAYRAPDPSHGFKYVRYVVQQHPYSLAAWNSYYKVVSRIEDRFPHHFKYLLRTREANPDCVPPIIISGHRFTAISQHQSAARDYLEAYKLDPENPLINLCVGTALISLALGFRLQNKNQCIVQAFAFLYRYLRLCDNSQEASYNIARAYHHIGLNTLAAVYYDKALSTEEKDHPIPKLPYEAGSRAPEDLRPGYCDVRREAAFNLHLIYMKSGATDLARRILKTYCTV

SEQ ID NO: 69761 - protein, 54 aa, Zea Mays
MQQQGEGIIPCCLYYSTRSKQSRTTRSLLYSGGCVSPSAACKDTGNHEPTWLSS

SEQ ID NO: 69762 - protein, 75 aa, Zea Mays
MLATATTPITWWLPITAPKSKAPRRAPRRPAWLSRRGLFFSGESFDQFAIRFRASRDRRSSFGDQVIKLLELYEI

SEQ ID NO: 69763 - protein, 114 aa, Zea Mays
MYNFLALANPTGSLVFSNLITSTLYDYEAEKQARQRRRRVMAELLASSPRSLHSAGLSAGGGGGGPLIKCEGPACFLVSSLIMSALCVVGAGLSLVTVHRTRRVYARLYRSVRT

SEQ ID NO: 69764 - protein, 617 aa, Zea Mays
MVGPEMLVAATVNQVVRKINEIIGVAQGETKLCCSFSDDLEGIKDTLVYLEGLLKNAESNSFGSDRANLRHWLGQIKSLAYDIEDIVDGYYSSKEQYEGSNYAQKGSLLCSLSNPMLSKINLKELTIISIVGPVGLGKTTLAQLIFNDARAETFRFRIWVHVSMGNVSLQKIGRDIVLQTTEKIEGNMQMQSIKNVVQDILNKYSCLIVLDSLWGKDEEVNELKQMLLTGRKTESKVIVTTHSSKVAELISTVPPYKLSLLSEDDCSAIFCQRAIAGQSISDPLFREYGEEIVRRCEGMPLVANFLGSVVNAQRQRREIWKAARDKDMWKIEEDYPENKIVPMFPSFKIVYYSMPHELRLCFVYCSIFPKGYVIDKKKLIQQWIALDMIESKHGTLPLDVTAEKYIDELKDIYLLQVLERHQIDAEISNTSEEKLYMNNLAHDLARSVAGEDILVILDAENVRCNRNYDYRYAQVSTSSLQSIDSKAWPSKARSLVFKSSAELQHVSEVLSVNKYLRVLDISGCSVKEMPAPIFQMKQLRYLDASTLSIADLPPQISGFPKLQTLDLSDTEVTELPAFIANLKRLNYLNLQGLHSAVMLFKPTVPYMLTRSQGSWIK

SEQ ID NO: 69765 - protein, 672 aa, Zea Mays
MAAKMAGAVQVLKDDTVKRTPMARPSNGREGKPIRLLSNHFSVKLRGVDAVFYQYSVCIKSEDDKVVDSKGIGRKVIDKLLQTYCSELDGKDFAYDGEKCLFTVGPLPQNNFEFTVILEETSSRAAGGSPVHESPTQANKKRVKRSHLAKKFSVDISYAAKIPLQSVALALRGSESEHGQDVLRVLDVVLRQQQAKRGCLLVRQSFFSDDSRNLVDLTGGVSGCRGLHSSFRTTIGGLSLNMDVSTTMVVTPGPVIDFLVTNQNVRDIRDIDWPRAKKMLKNLRVKAKHNNMEFKIIGLSDQPCSRQMFPMKVRNGNIEIKSVDITVQDYFKSKQVELTMPYLPCLDVGKPKRPNYLPIELCHMVSLQRYTKALSSQQRAMLVEKSRQKPQERMRVVTDAVKSNMYDDDPILSSCGIEIEKQLTRVDARVLSAPALVVGNSEDCIPNRGRWNYNNKRLFDPVKIERWAIVNFSARCDMSRISRELINCGRSKGIFIECPHSLVDEDSQSRRCSPVERVEKMFEKVKASLPGPPEFLLCLLPERKNCDIYGPWKKKNLHEMGIVTQCIAPSNKMNDQYFTNVLLKINAKLGGMNSKLALEHRQMIPVVTQIPTLILGMDVSHGSPGRADIPSIAAVVGSRCWPLISRYRASVRTQSPKGTSTRLLPNQSTKKA

SEQ ID NO: 69766 - protein, 63 aa, Zea Mays
MSISLLPLAHSALAFQQPATPALSLLAFVQNRAAPVLSSAAVLPPTAAASPGPQRRAVRWDSP

SEQ ID NO: 69767 - protein, 848 aa, Zea Mays
MVETRRSAAAKRSAAVVEEEKGSLASPALEPAEDAPAGLGAGDDVASSQPPKRAKVGCTESDTAKPSVAPAAGAVAGPLPNTAGLQARTGAMDKLEAFLKSKEAQSNPAGHKQGTNDKDLSAKMKRVMDLSEDISEKIKRSKDRLAVLLNKPAAGTSRRQEPWCRLISQHSMHPTLSIYGAIFTIGHGAHHDFRLDESSTASSVCRLKQAKRGALLEIFESKVVRVNGKSLDKAAKVTLNGGDEIIFCSPVRHAYIFEQLHEEKSSTSVLSSTCTCSSIQLGQHSHFNDIQDHVSSKGRKASSFLFGRGLSADPLNICKTTEGRSQFISEDNISSGRCQLLKEDLINATVDVSDISESFDSCPYYLSEHTKHALMSAAFVHLHCKNYFKFTKDISSLSQRVLLSGPTGTDMYQEYLVKALAKYFGARLLTIDSSMLFGGQTSKESESYKKGDRVRYIGSGIILDGQSPPDFGSQGEIFLPFEENRSSKVGVRFDKKILGGNNLGGNCEVDHGLFCSVDSLCPDIPGWEVTFKHPFDVIVEFISEEIRHGPLILFLKDTEKICGNNDSYHGLKSKLKHFPAGAFIIGSQIQPDNRKEKANVSSPFLSKFRYSQAILGLTLQDIDGGNDNNKETSKAIMKHLIKLFPNKVTLEAPQAEMELSRWNQMLNRDIEVLKGNANISKIRSFLTRLGLECTDPEAILVTDRILTNECIDKIIGFALSHQLKNCTNPDPPLGSVQFALSSGSLKHGVDMLKSIQSGSKSSTKRKSLKDIATENEFEKSLLADVTPPHEIGVTFEDIGALESVKDTLKELVMLPLQRPELFNRGQLMKPCKGILLFGPPGTGKTNAG

SEQ ID NO: 69768 - protein, 73 aa, Zea Mays
MVRHGTPSNVDRTQPRNSQALCEFMGGAPFSIFSRSLPVRSPFQVSPSSEFMGGARSHSRDLGVHREEGRSRP

SEQ ID NO: 69769 - protein, 89 aa, Zea Mays
MFAPLRTPPPRWNKQRSNADPRPPTLHLGVTVAAPWRQLAPSLPPPTPPLLSPSARCPAHAPPPPPPPNVDLPPRPSTLVCLQHATTAV

SEQ ID NO: 69770 - protein, 262 aa, Zea Mays
MEPLYPAHEPRSDTDIRLRSPQRKAREVEEASVVLKSPHRKTAVAAQVSTQVQQPSLPPQQPDEVGTKNSAAEVVMDVISPKTTQVGVVHGNPVDDDKEQRARYLKYSQKALGFAVCTFVGYASNASSTGSAAFKMAAAPFFVAIIADLLTLKTKAKHGCALIYLSSFHLILMTYLIFIAFDMAHAYAVLFLPLVASASHLQQKLWPPPPRDDGSADDRSKAVSKDLDSILELSSLILNWSSFVSAIMTVVRHFHHCCWQGQ

SEQ ID NO: 69771 - protein, 399 aa, Zea Mays
MAKPSVAVPEVGVPAAQASCTCPGTLLAYPPPRGAGVAAAVRRKCLQVELGAGAGLLGGAGAWGVESMRASSPTHARAAAALAAGGGVDVDVDEERAASWMARHPSALGRFERIVAAAEGKRIVMFLDYDGTLSPIVDDPDAAFMSETAFVGLAGEKQMRMAVRSVAKHFPTAIVSGRCRDKVFEFVKLAELYYAGSHGMDIKGPAAAKASSSSRHAAKAKGVVFQPASEFLPMIEEVHERLVQTTRCIPGAKVENNRFCVSVHFRRVDEKMWGELSESVRGVLRGYPKLRLTHGRMVLEVRPSIKWDKGKALEFLLESLGFADCSSVLPVYIGDDRTDEDAFKVLRRRGQDQGVGILVSKHPKETSASYSLQGPAEVMEFLLRLVEWKRLSRARLRLQ

SEQ ID NO: 69772 - protein, 116 aa, Zea Mays
MTCSSPCDGGIRYRDVACYGNLDDDTIKHYPVDDASCSADKMPARQEACNQQSCSDPEMTQSVNPKESGMSGWLVVLVVILGLSAAAGIAFTSYTYYVRRTSGTSGFVYVMMEAYS

SEQ ID NO: 69773 - protein, 589 aa, Zea Mays
MSNKEEKECQMTKEEKRRKKREKHKDMGQSGDYEGKAVMSNKEEKDCQVTEEEKKRKKGKKHKDKGQGSNSDSSCARNHSIEMEQADVSAKMAEDSCLEHAEAVTSKSSAKKHRKKKRKDKEVETIGQKQILDADENVGSEDTKRNSREREHDRKSKKHKRKHQDDETASNGSSGNQIVLGEDKRTEKEYLVTLDLEEDNKSDMSKIGKKTDSKKKRRKERNDGVDLRQNTLVGEGKNGKNNKEKKMCEDENGGGEREKENMGKQKDKCRRVSFTDHVEVFNIGGSDDVEGDGSGETELVHGRRFSPEEDAKLMEAILKYAELKQLGEKGLQMIGESNKHPETRGCWAEIALPHRPKKAKYARGKVLLQRSAERKWTAEEYEIIRRFVEKNGRNWKVLAKELGKSEIHVKDTWRRIKFKNLKRGTWSQDEYQNLFDLVNLDMRVKAHQNINTGHRHIRDNISWEAISEKLTTRRAEECCTKWYGQLASPLVKQGIWADTDDYMLVEALQNVDAVCAEDVDWENLLEHRSGELCRHRWNQMIRLMGDHRYRPFIEQVEVLARRYCPEMLAYRKPVAGGSSADEPAGASDL

SEQ ID NO: 69774 - protein, 162 aa, Zea Mays
MAAASSATSVHDFTVKDSSGKDVDLSVYRGKVLLIVNVASQCGLTNSNYTQQAQLYEKYKNQGFEILAFPCNQFGGQEPGTNEEIAQFACTRFKADYPIFDKVDVNGNNAAPIYKFLKSSKGGLFGDSIKWNFSKFLVDKEGRVVDRYAPTTSPLSIEGPRD

SEQ ID NO: 69775 - protein, 55 aa, Zea Mays
MTSTSVCVVCGVWLSLLILRPCGCSPTPTARRTCRRITTLAPTHSQYVIQKVFQS

SEQ ID NO: 69776 - protein, 219 aa, Zea Mays
MPVTQYLQAGTSSSLCRRQRRTTTRICSRCPSVPAKPYNYKKVKYVVEVVSYINSSRNAGWGAFNSCRWQVNGSGQFCGVAEMIGPVDFDRSVDYWQQDKWSGQFPVKWHIIKDVPNNLLRHIILENNDNKPVTNSRDTQEVQLGWHDAGTYDKNIIEWPKCSGANGSLRFKVELKHGANADLVNAMKLIPPSTTSEPHPRSMSAAPSSPFHLSAPIRA

SEQ ID NO: 69777 - protein, 533 aa, Zea Mays
MEPFSLKSCLLPHSIKDQNTGSWTRFVNDCGTELIRLQIREHKAKNSMAVVRELVGVLKSTKKQIQLAEFKENKWTLKDSNLPISHGTDGSLLDLKGDNHLIKLYRGRKLEYERKCCSAHSEDVSAVTAVKFCAEHPYGKAVALLDTEAQLIMVNEDWLLLPWISISVLFMDGDGGTKLGGGAMVQKGTVFGSDTSMVLETQTVGAGSVASNLAQCGTCSAVFGGDDKEMANCKVEHASSGASRTVVASGENGHTETAGCGGGCGSNCGPMMAEDPKAGNAKSGGCGSGCGGGCGGAGGCGTMANEGQSRSGGVGTLLSSNAMGGEGQQAHSAGCGSGCGGGCGSGMVIEGSKANNAMSGGCGSGCGGGCGSGMLIEGSKANNAMSGGCGSGCGGGCGSGMVNEGSKAANTMSGGCGSGCGGGCGALFNASTAAGEGLHNKSAGCGGGGCGSGCGGGGGCGSGMAIEGFKANHAKSGGCGSGCGGGGCGTGSMVAEGSNGGNAKSGGCGGGCGGGGGCGGGGCGGGCGAVFNA

SEQ ID NO: 69778 - protein, 286 aa, Zea Mays
MATYYSSPDSERDSQTMYSTESGNASYPVPSALGNFLYLNSASSGPYTEFNGIVQSQQNFMELTGHPSAISHDSSSNEATNIGTSLTEQRSFGPLKDMRNEMLMHLMDGAHSSGSDLIHNDDHSTAQLEFGMLNNHNSTSLPSASGQGLSLSLNTHILAPSYPYWSAKQDLLTPNSYQGDDNRMKNMQSEASQAIRNSKYLKAAQELLDEIVSVWKSVKQKTDKGPSEAGKSDGKETDGGTKSEGVSFDPQESGANTAAELSTAEKQELQNKMVKLMAMLDEIACF

SEQ ID NO: 69779 - protein, 518 aa, Zea Mays
MQEILDQQVAEEAAEAEGAGAMATITNQRRTAKKGAGATVTPRKGTQEKSKVQGKGYKDKCYESIRMAVEARFNKLLTELVFVEDLMEALEEAKAIGDELGDIYDYVAPCFPPSDRANDIQNINILKVTGWVVQYQENLIGLGVDESLAQVCSESGALDPLMNMYVERMQATTKKWYSNILEADKTQPPKSTEDGKLYTPAAVDLFRILTEQVQIVRDNSTDVMLYRIALAVIQVMLDFQAAERQRLEEPASDVGLESLCALINNNLRCYELSSELSSSTLEALPQNYAEQVNFEDTCKGFLEVAKEAVLQTVSVIFEDPGVQDLLVKLYQKDWLEGMVTEYLVATFADYFGDVKMYIEERSFRRFVEACIEETIVVYVDHLLSQKNYIKEETIERMRLDEEVLMDFFREHINVTKVESRVRILADMRELASAESLDSFTLIYTNILEHQPDCPPEVVEKLVAMREGIPKKEAKEVVQECKEIYENSLVDGNPQKSGFVFGKLKCLTAKKGIWRKLGQ

SEQ ID NO: 69780 - protein, 491 aa, Zea Mays
MLSGVDHDVPDGIGMARLAWTRLPTADGEGAGPSTSEAADDELLSGAAIESLDYEVIENYAYREEQAQRSKFWVPYYVMLKWLFALLIGVGTGLAAIFINLAVENFSGWKYTATFAIIKHSYFVGFFVYTVFNLALVFSSVYIVTNFAPAAAGSGIPEIKGYLNGVDTHGILLFRTLVGKIFGSIGSVGGGLALGKEGPLVHTGACIASLLGQGGSAKYHLSSRWVRIFESDRDRRDLLIFVFEVSQLEILWPSHEAIVKVTCGCAAGVAAAFRAPVGGVLFALEEVTSWWRSHLMWRVFFTSAVVAVVVRSAMNWCNSGKCGHFGAGGFIIWDISGGQEDYSYQELFPMAIIGVIGGLLGALFNQLTLYITKWRRTCLHKKGKRVQIFEACLISLVTSTISFVLPLLRKCSPCPKLETNSGIECPHPPGTDGNFVNFYCSQDREYNDLATIFFNTQDDAIRNLFSAKTFHEYSAQSLITFLFRLASSFPE

SEQ ID NO: 69781 - protein, 186 aa, Zea Mays
MLARYIGLSNETPYGLMKFLQLSKDSQLLPKLLTLQNSYNLLCRNFDSGLAECCHHERISLLAYSPMAMGILSGKYHLSDNCGPPDARMNLFKGRYSEGESRYKLQSPKVKAAVKEYTQISAKYGISPVTLAIAFVLRHPLVASAVFGATKLWQLDEVLQATTVHLCEEIVAEINDVHARYPNPCP

SEQ ID NO: 69782 - protein, 57 aa, Zea Mays
MLNHPCIGWFGRRVYSFKVLVLCVVSRTSYVKRVSLFLSSNSPLPMNRYYRWPAVPG

SEQ ID NO: 69783 - protein, 382 aa, Zea Mays
MGVHGAVAKRPCSRQHLLLLVVAILIGSYFAAAAAAAADEQKSRNRGAGRRSRRRRAAAAVTSPPAPLMVPITILESAVDLGAVCMDGTPPAYHLHPGSGAGNNSWIVNLEVNGFYFRGQRVWDATVRHLLSIGMAAADQVLLAGCSAGGLAVILHCDQFQAFFPRSNNAAAAGGTTTTTTVKCLADAGLFLDAIDVSGGRSLRSYYSDIVAMQGVGPNLPPACTARLDTASCFFPQNVIDGVNTPIFLLNAAYDAWQIQESLAPSGADPSGAWRACKSNHSACDATQMKFLQGFRDQMVASVLGGRFAGSRSNNGLFINSCFAHCQSELPATWSWSHAAGASPAIQSRGIAKSVGDWYFGRAQVKAIDCPYPCDGTCRNII

SEQ ID NO: 69784 - protein, 99 aa, Zea Mays
MEKFINESMGFQANMLKSSNEDLVLLLNEKSSLEDESAKLKVKINSIHSSSKEYIAEILEEVNTENSVLESELRYMISEYKDVQKDINNLKILFSSSNS

SEQ ID NO: 69785 - protein, 421 aa, Zea Mays
MTPKWSACSSNSYRELPSHENGECKSTLTESVPSPTSCFGLHTANTMCSLSSQKKDGNVYKRRKMDKDSNSPITFEDAKEMATQSCTISDDHSSLLLPIISSEALLLNSTAGMAGPILDCEEPADVPLEPNSGTDDRCFISNMSPTSMTPDKKNAAECSSSNIGPTESITEHISPRDLCIAILMKDGLINESRTRMAHKEEFTDNDANPLLACNNCGCLEHSLKMLICDSCEAGFHLSCCIPCIKELPTDEWYCAPCLCKKPKSLYGKLSEGRINPSRNTNTRPHGMSHIEYMLKDAEPYVTGVRLGRDFQAEVPEWSGPSSSSDVYFDEPCAIDSAELTTFNLCKMSNQSHSSIGNWIQCRETLNPGDSDKQVVCGKWRRAPLYVVQSDNWDCFCCLLWDPVHADCAVPQLGGGFGKLGP

SEQ ID NO: 69786 - protein, 245 aa, Zea Mays
MGGVRLQHDVPVVAPGHPLQGVWPGSSIHPVLRIGGDAGGCCGQDHGCSGRAPRGCPLSDGASSSRTEEVLRLAAPPGLLCRGRLGAFLPQLSRGKLKPRFVELYRITECINEAAVRLALPLRAKLHDVFHVGFLKKFIGDPPEVPSPLPSMLHGAVTPEPEHVVRFRSARGVRQVLIHWKGQSAASATWEDVADFRDKFPQFQLEDELDVEGGEMSCTGKRIGAIVTSGARRAGCSHDTGRCHR

SEQ ID NO: 69787 - protein, 858 aa, Zea Mays
MATAARKGSSSRSAAAAAATVAVLFLTVVSAAGGAAATPRRLLVDTDMDTDDLLGLLYLLKQNRSEIDVKAITISANAWSDAGHAVNHLYDMLYMMGRDDIPVGVGGDGGISYAGDVQRDVGGYLPLIDQGMSTDGGCRYRQAIPLSGRLDVDTNSGVRKGFLPRGSRAYRPLRQPTAQRVMADALSAGPTSVLLLGTHTNLALLLMSRPRLRRNVERVYVSGGAVRAAGNLFTAAAANPVAEFNVFGDPFAAYLVLHSGVPITMIPLDATNTIPVTEAFYSEFQRRQRTYEAQYCLLSLDGGFYLWDPFAVGVAISSMRHGDGETSNEFAELEYMNVTVVTSNKPYGARDDGSNPFFDGRTTPKFGLREGGVHSGHVETGIRDPFCLVPGSNRGRCQDGYTKEVAGPEAVQMLVATRARPNTNKSSPLDKKFMETFLEVLNLPQNTGRFNISTQFPYYREVLYKPDSIMNVTRRGGKPKPVVFDMDMSPGDFVSLICLLKEPRHEIDLKAVLVNGNGWANSASIDIVYDVLHMMGRDDIPVGLGNATALGSPTLGCNNSYAIPQGSGGFVDSDTLYGLARSLPRSPRRFISDDLDHPERRHPSAFDVWRSVRKQLGPGQKITALTSGPLTNLASIISLSDMDAGSVIERVYVVGGVVRDGGDDRGNVFTVPSNRYAEFNMFLDPLAAKTVLESGLNITLIPLNVQRKVSSFEGVLGALKQHTQHTPESKLVRRLLLLLQQLQREQRKFYHHMDIFLGEVLGAVYMVQGSNLEPSVEVKSICIVANTTESINGLILVKKSAKPVDVLYSLNTGAYYDHLANSLVNHKQSAPIGSFGEQKAIWSRPQKHLGTDIAKDRK

SEQ ID NO: 69788 - protein, 156 aa, Zea Mays
MESLGVLLLHPLDTYLEQELDRRCRLLRLWEVPHDRRGEFLRAHASSIRAVVIGGGSGFGGNPALIDDLPRLEIIACYAVGYDCVDLTRCRERGVRVTNTPDVLTDDVADLAVGLAIAALRRIPHADSYVRAGLWKANDGHYGLTTRLRFLPYRAI

SEQ ID NO: 69789 - protein, 339 aa, Zea Mays
MAPSSLTPCSALSIHVINKNGNEDALPVCLEARPVERGAGDMIGVGALSTKETEIKCIKGTKTLWSDRISGKVTVLAGNANFWAVGCEDGFLQVYTRCGVRAMPAMMMGSAAVFIDCDDSWKLLLVTRRGLMYIWNLYDRACILHDSLASLVASPDESSAKDAGTVKVISATFSRCGSPLVVLASRHAFLYDMSLKCWLRIADDCFPASNFASSFSFPQGGELGKLQIDIGKFMARKPIWSRVTDDGLQTRAHLENQLASSLALKSAQEYRQCLLSYVRFLAREADESRLREVCESFLGPPMGMVGSASPTDPKNLAWDPDVLASLPAGARSRHQLQAV

SEQ ID NO: 69790 - protein, 493 aa, Zea Mays
MQSLLAGIPAGGAAAAAAVGGLVAAAALAERADQKNRLNLPPAVPGLPIIGNLHQLKEKKPHQTFARWSEEYGPIYSIRTGASSVVVVNSAEVAKEAMVAKYSSINTRKLPKALSVLTRDKKIVAMSDQGELYKMVKRYIMVSMLGAAAQKQFRDTRNTMIDNMLSTFHALVADDPKAPLNFRDVFQNELFGLSMTQALSEDVSSVYVEEFGKALSREEIYQTAVADMMMCAIEVDWRDFFPYLGWIPNRSFETRVLTTEARRTALMQALINQQKERIARGESRMSYVDFLLAENTLTDEQLLMLVWEAVIEAADTTLVTTEWAMYEIAKHPEKQEYLYQEIRKVCGNKTVTEDHLPELPYLNAVFHETLRRHSPVPLVPPRLVHESTNLAGYEVPAGTQSDWDAPEEWRPERFLDGSFEVADMYKTMAFGGGRRACAGSIQAVNIACTAIARFVQEFAWTLKEGDEDKDDTIQLTTNRLYPLHVYLTPRGRK

SEQ ID NO: 69791 - protein, 412 aa, Zea Mays
MRDDNSSKNKLSWSKTLVRKWFNIKTKAKDFHSDYAAEEAGVQWRTSFSDRDACKSKKSRTERLTKRNVERDGRVENGFDGAYITNTQDYRVFVATWNVGGRSPSSHLNLEDWLHTSPAADIYVIGFQEIVPLNAGNVLLTEDNGPAKKWVSLVRKTLNNLDQQGSGVYNYHTPSPAPDPIVELNVDFERSSRRQRNSSFFHRRSFQSLNRSSRIDMMDPHSLVDRRFSVCDRISFGSRPSDVDTSVRCGGSSDDETIDEESPSGMFFPPMPCAYGAPLCDGSRYCLVASKQMVGIFLMVWVRSDIREHVKNLKVSCVGRGLMGYLGNKGSISMSMSLHQTSFCFVCTHLTSGQKDGDQLRRNADVVEILRKTRFPHVHGAGEEKSPETILDHELWLRCTTGSSCWKRTSFA

SEQ ID NO: 69792 - protein, 619 aa, Zea Mays
MAMTPHASAATVAVTPALRFPHTLSATGLSSPPLAGGCGGCRVRFRPSQRGRGTQGRRGGSHVSRVGGLLGTVFGGGGRDDGEATRKKYADTVARINSMELEVSALSDADLRARTAALQDRARSGESLDSLLPEAFAVVREASKRVLGLRPFDVQLIGGMVLHKGEIAEMKTGEGKTLVAILPAYLNALSGKGVHVVTVNDYLARRDCEWVGQVPRFLGLQVGLIQQNMTPEQRRENYSYDITYVTNSELGFDYLRDNLAMTVDELVLRNFNYCVIDEVDSILIDEARTPLIISGLAEKPSDRYYKAAKIAEAFERDIHYTVDEKQRNVLLTEEGYADAEEILDIDDLYDPREQWASYILNAIKAKELFLKDVNYIVRSKEVLIVDEFTGRVMAGRRWSDGLHQAIEAKEGVPIQNETITLASISYQNFFLQFPKLCGMTGTAATETQEFESIYKLKVTVVPTNKPMIRKDDSDVVFRATNGKWRAVLVEISRMNKVGRPVLVGTTSVEQSESLSKQLREAGIPHEVLNAKPENVEREAEIVAQSGRLGAVTIATNMAGRGTDIILGGNAEFMARLKLREILMPRVVNPIDGVIVSKKQMPPRKTWKLKWLSKNGEINH

SEQ ID NO: 69793 - protein, 75 aa, Zea Mays
MNAYECNAYVLCLHTSKGMKPHRTPPRATYDAKLYRYGRTIGHDKTSDANESCNVYGMLHLSITFTSFRYNTNLK

SEQ ID NO: 69794 - protein, 817 aa, Zea Mays
MPVLWIGRLSSPFGHQDVAEPVNRHEDPLGCKVSSSINCSTRQKNQNLELQSEISLIDLVSYEGSKNRLTAQSAHEPHVSFSVKGLGHIKMETPPHSPRRAKRVLPLPPKPMRFIHKAKRSIPFDVTKALDSITSINMLKEQRPSAKMCSILDEAGYERREQFNCYLPDSSKSLNADLYVEDEDMFYEPQAEKDWQSKHSRSDGNLADENYDGLWRMDEFNSEDHLFTQRDKHVDISGYGFKDGYSPERRNSTRPVTVFENTGIQSSHDLFSDHSLMDDEDTELFKWESHPPSKKKSNSNSNFGPSAWPYDMVDGSEKRSPISEESCSSAAAMKDRTCKKQSPSMKNDMNENDEFHIRLDKLDIPNMDAPLHGRSLFNNPEKLDRKETAPRKKLETNWLQSVTGQPRTQEPSCRLSLNEKFSNWDSPTFRSKSTTGLTDKSSCTMLHKDKSSFDAAPDLDMYQTVESTQKRPVSKVHSIYQRPEKPIFEDEIHMQHTVSDMFHDKIELSNPYQNKNLQSDIDMSTFIGQKVEKQEDEFPCFSSSSADTFRAEKAARSVRQTVDRHSTCSQPSGRDSFRHGFSPGFNFQESEPNTFWADSYVCNGTFQAGLEFSGVVARKDSDKNEVKIEASEKPDTKILTGTCWLSADNRNVINGTETCSDGSEAFNCSEAQKETSAVVTQIPANLSSLRETSAELFQVRNHVIPVKREKIDNPGVDFDAVMHSKSKIHDVRDHSKLNTTFRSPFIGEVVGIEKKIVANVSPDNSDVQYQFMLEQRVLRRLCVQKIVVPTPMKDRLDKDTNFTIAEDGSLHVLPKSV

SEQ ID NO: 69795 - protein, 665 aa, Zea Mays
MAEVDHLAAERATARFDVEEMKVAWAGSRHAVHVADRMARLVASDPVFRKDNRTMLSRKELFKDTLRKAAHAWKRIVELRLTEEEADLLRQYVDQPGYVDLHWGMFVPAIKGQGTEEQQHKWLPLAYKFQIIGCYAQTELGHGSNVQGLETTATFDPKTDEFVIHSPTLTSSKWWPGGLGKASTHAVVYARLITEGKDYGIHGFIVQLRSLEDHSPLPGVTLGDIGGKFGSGAYNSMDNGVLRFDHVRIPRDQMLMRLSQVTREGKYVHSNVPKQLLYGTMVYVRQSIVADASKALSRAVCIAVRYSAVRKQFGSQDGGPETQVLNYKTQQSRLFPLLASAYAFRFVGDWLNWLYTDVTQKLEAKDFSTLQEAHACTAGLKAVTTSVTADAIEECRKLCGGHGYLNSSGLPELFAVYVPACTYEGDNVVLLLQVARILMKTVSQLASGKQPVGTMAYMGKVQYLMQCKSAVSSAEDWLNPDAIQEAFEARALRMAVNCAQNISQAASQEEGFYERSPDLLEAAVAHIQLIIVTKFIEKVHQEIPGHGVKEQLQALCNVYALYILHKHLGDFLATGCITPRQGALANEQLGKLYAQVRPNAVALVDAFNYTDHYLGSVLGRYDGDVYPALYEEAWKDPLNETVVPEGYHEYLRPLIKQQQLKLSRL

SEQ ID NO: 69796 - protein, 414 aa, Zea Mays
MAVILSSAAPTILTRPTRPRRQPRSGLRGGLARLSAALGLAHAGAGAGAALAAPLSYEEMLRLSSDSGGDVGGFALPELGLDGLVDFVNDNPLVVAAGVAAIAVPLLLAQLLGGGGSSKPYSVLSAKAAYQRLLEEPDAQLVDIRPLKDAREAGTPDLKEAKKKAAAVPYNGEDKNGFLKKLTLKFKDPENTTLIILDKFDGNSELVAELVTANGYKAAFAVKDGAEGSRGWKSSNLPWKAPPKGFSFDLGELFGDGSDGLPVTIGLAAATGLGVLAYTEIETLLQFLGSAAVVQLVVTKLLYAEDRQKTLKQIDEFFNKKVAPKELIDEIKEIGQALLPLPGDAKSQPALATATQVAATQTAAPAEDATAEATTESDPATPTPLSPYTNISSRHQPLRHRQWSLKSRRRLAAP

SEQ ID NO: 69797 - protein, 155 aa, Zea Mays
MAQKTKEAEITEQDSLLLTRNLLRIAIYNISYIRGLFHEKYFSDKSVPALEMKIKKLMPMDAESRRLIDWMEKGVYDALQKKYLKTLLFCICEKEEGPMIEEYAFSFSYPNTSTEEVAMNMSRTGSKKGSTTFTSNASEVTPDQMRMFGPGVKAD

SEQ ID NO: 69798 - protein, 887 aa, Zea Mays
MAALRLPAQPVARWPHLPSAYAAAAAARRVSAPRGHLAARRAKGEEPPEPPVRTLLIDNYDSYTYNIFQELSVVNGVPPVVVRNDEWTWGDIFNRLYKDRTFDNIVISPGPGSPACPADIGVCLRILLECGDIPILGVCLGHQALGFVHGAEIVHAPEAIHGRLSEIEHDGCHLFNRVPSGRNSGFKVVRYHSLVIESGSLPDDLTSIAWTASPNLLSYLESDRTNVSTFLGTLDNNLMRNPLEYSNNGGELSNIGHACESDDSRVIMGIRHSSRPHYGVQFHPESIATHHGRQIFRNFKKITGNFGLRSSWIQERKVHSIGKLEKSQVNSASHHDSIPKDLLHTERMELSESVLGKRGIGKKCLRLQWKKIENFVCPTVGSEDIFAVLFGHQSGEDTFWLDSSSVDQNRARFSFMGGKGGSLWKQMSFHLSGQRANCGGMLSIQDAYGFTAKKFIKDGFLEFLNKEIESIQYNEKDYEGLPFEFHGGFVGYLGYGLKVECDASSNKAKSSTPDACFVFADNTVVVDHSNGDVYILSLHDEFYSSNGDGICKNSTHTSWLVETEKKLLRLGGMPSGSPIIRKTHARSSSVHKQSFVVEKSKDQYVRDVQNCLDYIRDGESYELCLTTQMKRRADCINALQLYLKLRKQNPAPYAAWLNFSSENLSICCSSPERFLRLDRAGVLEAKPIKGTIARGRTPEEDECLRLQLRYSEKDQAENLMIVDLLRNDLGKVCEPGSVHVPRLMDVESYRSVHTMVSTVCGTKKPDLSPVDCVKAAFPGGSMTGAPKVRSMEILDSLETSPRGVYSGSIGFFSYNHTFDLNIVIRTVILHDGEASVGAGGAIVALSSPEAEYDEMLLKAKAPTEVVEDLVQTIYSSDRSDSMQTTIS

SEQ ID NO: 69799 - protein, 470 aa, Zea Mays
MGKEKSHINIVVIGHVDSGKSTTTGHLIYKLGGIDKRVIERFEKEAAEMNKRSFKYAWVLDKLKAERERGITIDIALWKFETTKYYCTVIDAPGHRDFIKNMITGTSQADCAVLIIDSTTGGFEAGISKDGQTREHALLAFTLGVKQMICCCNKMDATTPKYSKARYEEIVKEVSSYLKKVGYNPDKIAFVPISGFEGDNMIERSTNLDWYKGPTLLEALDQITEPKRPSDKPLRLPLQDVYKIGGIGTVPVGRVETGVIKPGMVVTFGPTGLTTEVKSVEMHHEALQEALPGDNVGFNVKSVEMHHEALQEALPGDNVGFNVKNVAVKDLKRGFVASNSKDDPAKEAASFTSQVIIMNHPGQIGNGYAPVLDCHTSHIAVKFAELITKIDRRSGKELEKEPKFLKNGDAGMVKMIPTKPMVVETFSAYPPLGRFAVRDMRQTVAVGVIKSVEKKDPTGAKVTKAAAKKK

SEQ ID NO: 69800 - protein, 58 aa, Zea Mays
MIAHIMFGCFLCNSSLTPFYSNFFAYVSTQFGATIKAVPYDNGCEFNNSSARHNPCCI

SEQ ID NO: 69801 - protein, 579 aa, Zea Mays
MDSATSGAMELVAALLRGRVPPELGGDGAEGRALVATLAAAVLGAALFVLWRRAAAGKKRKREAAVAAAEATQAKARGGKAAEEEKPADDGRKKVTVFFGTQTGTSEGFAKALAEEAKSRYDKASFKVVDLDDYAAEDEEYEKLKKEKLALFFVATYGDGEPTDNAARFYKWFTEGNERGVWLNDFEYAVFGLGNRQYEHFNKVAKVVDEILTEQGGKRLVPVGLGDDDQCIEDDFNAWKEALWPELDRLLRDENDASPGPTYTAAIPEYRVEFIKPEEAAHLERNFSLANGHAVHDAQHPCQANVVVRQELHTPASDRSCTHLEFDIAATGLTYETGDHVGVYTENCPEVVEEAERLLGYSPDTFFTIHADKEDDTSLSGSSLAPPFPSPITVRNALARYADLLNSPKKASLVALASYASDPAEADRLRFLASAAGKDEYAQWVVASQRSLLEVMAEFPSAKPPLGVFFAAVAPRLQPRYYSISSSPSMAPTRIHVTCALVRETTPAGRVHKGVCSTWIKNAVPSEESKECSWAPIFVRQSNFKLPADPSVPIIMIGPGTGLAPFRGFLQTCSKRIWS

SEQ ID NO: 69802 - protein, 1353 aa, Zea Mays
MAAPGRRTADVSSSSPSPSPAAPSTGRRLLRTQTVANLGESIFDSEVVPSSLVEIAPILRVANEVEVENPRVAYLCRFYAFEKAHRLDPTSSGRGVRQFKTALLQRLERENDPTLKGRVHKSDASEMQRFYREYYRKYIQALQTVVNKDDRARLTKAYQTAAILFEVLRAVNDSQSVEVDQAILDTHIKVEEKKKLFLPYNILPLDPESTGEAIMRYPEIQAAVYALRNTRGLPWPKDQDKKPEEKNTGKDLLDWLQAMFGFQKDNVSNQREHLILLLANVHIRKIPKADQQPKLDDKALDDVMKKLFKNYKKWCKYLGRKSSLWLPTIQQEVQQRKLLYMGLYLLIWGEAANLRFMPECICYIYHHMAFELYGMLAGNVSPMTGENVRPAYGGDEEAFLTKVVTPIYKVIEKEAERSKTMKSKHSHWRNYDDLNEYFWSVDCFRLGWPMRADADFFKTPKDPYLNHLNGENRSAGNVHWMGKVNFVEIRSFWHIFRSFDRMWIFLILSLQAMIIIAWNGGTPSDIFDAGVFKKVLSIFISAAILKLGQAILDLVFGWKAKRSMSFAVKLRYVLKLISAAAWVVILPVTYAYTWENPTGLARTIKSWLGDGQNQPSLYILAVVIYMAPNILASMLFLFPFMRRILESSNVKVITIMMWWSQPRLFVGRGMHEGAFSLFKYTMFWIILLAMKLIVSFYIEIKPLVQPTKDIMREPIRTFQWHEFFPHGTNNIGVVISLWAPIILVYFMDTQIWYALFSTLIGGIYGAYRRLGEIRTLGMLRSRFESLPEAFNERLIPSDANKSKGLRAAFSSRPKASGDESEREKRAARFAQMWNAIITSFREEDLIDNREKDLLLVPDCKDRELDIFQWPPFLLASKIPIALDMAADSGGKDRDLTKRIKSDPYFSFAIRECYASFKNIINTLVFGQREKDVLVQIFTVVDKHIEEETLITGLNMKNLPALSKKFVELLELLQKNKEEDLGQVVILFQDMLEVVTRDIMEEQDLLETLDSLHGANSRKHEGITPLDQQDQLFAKAIKFPVVESNAWTEKIKRLHLLLTVKESAMDVPINLDARRRISFFANSLFMDMPNAPKVRNMLPFSILTPYYKEDVLFSLQNLEERNEDGVSILFYLQKIYPDEWKNFLERVGCKNEEVLREDEQLEEKLCLWVSYRGQTLTRTVRGMMYYRKALELQAFLDMANNDDLMKGYRAMEVMSEDSPLKTQCKAIADMKFTYVVSCQLYGIQKRSNEPCAHDILRLMTEYPSLRVAYIDEVEAPSKDRIKKIEKVYYSVLVKASVTKPNEPGQSLDQVIYKIKLPGNAILGEGKPENQNHAIIFTRGECLQTIDMNQVCFMH

SEQ ID NO: 69803 - protein, 352 aa, Zea Mays
MDKAALVAENSTDAGGSSSSFSGLRAYGRALAQTPRRLARRACAATAPREEMSRVRARSGPRMARALRWWDLVGLGLGGMVGAGVFVTTGRAARIYAGPGLVVSYAIAGLCALLSAFCYTEFAVDMPVAGGAFSYLRVTFGEFAAFLTGANLIMEYVFSNAAVARSFTAYLGTAVGVDAPSKWRIPVPGLPQGFNQVDLVAVGVILLLSVCICYRPADGGAGAVHGAGRAPEPRLHRHALRFLHGGQRRRVPPLRGRPVPRLRPEEEGLAGAGLHRGLLPHCDLLHAAVAVRAGGRRQGRAPVRDRGGRSRRGCRVPGAGAAGARARAVGRARDALGARRVRLPQRIPARLA

SEQ ID NO: 69804 - protein, 505 aa, Zea Mays
MLLRCNIYFLTGVEAQTLANVYLALENNLEIIPVLNKIDLPGAEPDRVAQEIEEIIGLDCRDAIRCSAKEGIGITEILDALVTKIPPPKDTSKDPLRALIFDSYYDPYRGVIVYFRVIDGSMKKGDKICFMANGKEYVAEEIGVLSPNQMQVSELYAGEVGYLSASIRSVADARVGDTITHYSKKAHHALPGYSEATPMVFCGLFPIDADQFEELREALEKLQLNDAALKFEPESSSAMGFGFRCGFLGLLHMEIVQERLEREYNLNLIITAPSVVYRVNCADGETVECSNPSLLPEPGKRRSIEEPYVKIEMLTPKDYIGSIMELTQDRRGEFKEMNFITESRAKLIYELPLAEMVGDFFDQLKSRSKGYASMEYSVVGYRESQLVKLDIQINGDPVEALSTIVHRDKAYAVGRALTQKLKELIPRQMFRVPIQACIGTKVIASEALSAIRKDVLSKCYGGDISRKKKLLKKQAEGKKRMKAIGRVDVPQEAFMAVLRLEKEVL

SEQ ID NO: 69805 - protein, 55 aa, Zea Mays
MKDMYREALWQKRGRHRELYPDVSSKDAPVPPEFPVPNYDCGRLAWVHQSQHPDT

SEQ ID NO: 69806 - protein, 888 aa, Zea Mays
MATAAAMADDDDFASPPLAPRAREEGGGRGVYQVGGVPVEFPYKPYGTQLAFMGRVIATLDRARRQGRSHALLESPTGTGKSLSLLCSALAWQRHYPLRSPPAPDPLLHGGGFVPDDTQPQPTPVVPEKAVKKKNAPIIYYATRTHAQISQVVREYRKTSYRVRMAILASRKHYCVNKFACASDNIDEKWNAQKLSRHPSLQIGGCYEVHDIEDLVRVGQKAKGCPYFAAQHMAEAAQLVFCPYNYLISPVVRRAMDIDISGSIIILDEAHNIEDIARDAGSIDIDEESLCYLKQMLKLIHYGEVLQGELQNLAANEAVAMIYQPLHDIIQALIGWIAEREDNLHNHEFGHPASYWTGEKAMNELQRAGISPMYFPVLQECATKAIKAASDTESDGSHLSGGSAMTLESLFSSLSYFFAQKGRNSCDYQLALQRFVKKEGKDVISSTCTMSLWCLNPAVVFQEIADRTLSVILTSGTLSPMGSFTSELGVQFEACMEAPHVINADSQVFAAVLSSGPTRQILNASYKTADNSSFQDELGASLEEICRIVPGGALVFFPSYKLMDKLQVRWSQTGQWARLNAQKHVFVEPKGSSEELDPVLKGYYDAILGKAPVKKGRGGSKQIAKNRVTKKSSQESVKAGAALLAVCRGKVSEGIDFADDNARVVVIVGIPFPNINDVQVKLKRRYNDSYKSSKHLLSGSEWYCHQAFRALNQAAGRCIRHKSDYGGIILIDERYQDDRNVLYISKWLRNAIKKYDSFQETMAKLQKFFQNAQEKIKIKDCGIFPKVKLDNEAPQSFSDDKRKLPWPELSSSNHSVSRCNQKVKTECLSQRIPDIDGVAVNQKVVGVANTGANYGVKTEIIKLEEDDFKPRDHYLKSIRRQVTATYSC

SEQ ID NO: 69807 - protein, 308 aa, Zea Mays
MSTFYFFSGGIAALAAVAALFQGSWRALYAVTSLPSLVFAVAVVPFFVSESPRWYLVRRRPDDALRVIRAIAATNGRAVPEDLRLKLDDEEPGNKDVGGSTAHAASSGSIVDVFRSPTTRVRLVLSVLINLLSSVVYYGLSLNVVNLKTNLYVTVVVNSLAEMPAYLLTALLLDHFGRKPLAIGTMLLSGVFCTAGSLVPGAGIMRVACGVVGIFGMAATYNLLFIYTAELFPTVVRNAALGCTAQAAQMGAIVAPLVVMLGERLPFAVFGASGIVGGLLVLYLPETMNKPLYDTMAGLEEGEKNVVK

SEQ ID NO: 69808 - protein, 53 aa, Zea Mays
MEALCVGLQSCLHYTVISAGGDVVRSRSARLALAATRTMTLHNQPPLCSFPAW

SEQ ID NO: 69809 - protein, 409 aa, Zea Mays
MRRPLASAALRLRFFSSTSPARLLSPCPFLLSRRDDDGGREASSSPLPPLPPSGSAFSPRPLLFSASAAAGLFSLHGGWWRQALPPAASRPLGSVSDAAPVRLTISRSYSLRVAKGKKKAHFDDEHSHRAVNMALWCNFLVFSLKFGVWISTSSHVMLAELVHSVADFANQALLAYGLSSSRRAPDALHPYGYSKERFVWSLISAVGIFCLGSGATIVHGVQNLWNSHPPENIHWAALVIGGSFLIEGASLLVAIKAVRKGAEAEGMSIWDYIWRGHDPTSVAVMTEDGAAVTGLAIAAASLVAVQMTGNAMYDPIGSIIVGNLLGMVAIFLIQRNRHALIGRAIDDHDMQRVLEFLKSDPVVDALYDCKSEVIGPGFFRFKAEIDFNGVVLVQNYLERTGRGSWAKQL

SEQ ID NO: 69810 - protein, 83 aa, Zea Mays
MNLLESFGHQSCFIYVNIFIHVCLFLVKPLAVDRTCTIDWITQVPNLIVMHRLYFGFHGSKPLIGVRSHHCFFVGCRHIIVQQ

SEQ ID NO: 69811 - protein, 480 aa, Zea Mays
MNGFYPCVIMLELVTGSKEEPDITNVLRRWSHRWKKSGQRTPSFQRHQVSKCIGLAKRCKEVEPTRRPSICDILAALGKMEDMNCSDQQVDEEVTYLEDMLGIEPLDLHFLVEPTKQISCSVHLTNATNDCFAFIVQTTNPKQYCIQPDRGVVPPRSECSVAIVLSQEPTHNKRCSMEDELSVQSTRVDEGVTAADVSEALFTGKEDRTVDHVSLMVGFDMSPSPPEEQTEDFTFAPLASLYDEEPQLSAAKVSVWTSNQLGRSGRFSKKKLVSILKSWRARLKVSSHKKLETPKHDCEIPEAVEHEEVAAPRCPKGPLPQRDLSPLGEACSRMNMTAIHEILVNRHYRDDDLDPNVPSLEEWTQQSRDMLDDRKRGDFTFRDKDFRAAIDWYTKCMDVGPKKASPTVLVRRSCCHLMCGNLDAALRDAMQAQRQYPDCPTSLYMQAVALSKLGMHSQAMGMLIEASEMEANQKKTRKAA

SEQ ID NO: 69812 - protein, 326 aa, Zea Mays
MVALPTGNIENWGESAMAGSPMTDTSTDPDTDERNQMFEQGLVAVPTASDSSDKSRDKLDQKTLRRLAQNREAARKSRLRKKAYIQNLESSRLKLTQLEQELHQTRQQGIFISTSGDQPQSTSGNGALAFDMEYARWLEEHNKHVNELRLAVNAHAGDNDLRGIVGSVMAHYDEFFRLKGVAARSDVFHVLSGMWKTPAERCFMWLGGFRSSEVLKQSSQQAEDALSQGMEALQQSLAETLASGSLGPAGPSGNVANYMGQMAMAMGKLGTLENFLRQADNLRLQTLQQMQRIFNHPTIRTSPTCNKRLLLSAACFEFSLACPSRE

SEQ ID NO: 69813 - protein, 55 aa, Zea Mays
MVVRDILRSGAVQAPQLTTSLRSSVLDGILRQLPHPIRVMPSIIVFYAYHMHYLC

SEQ ID NO: 69814 - protein, 56 aa, Zea Mays
MANTMNEMQAQMRQERQEMRQERQEMREEMRQERRETQQQPPLPPPPPPVPPRDKH

SEQ ID NO: 69815 - protein, 84 aa, Zea Mays
MASSGDEGRVVVDLGSAAESVAADEEAHATPLHQIESLCMRCGENVSAPVSRLFCLGAFWNRDITNTDILKIGIPNNAIEILVL

SEQ ID NO: 69816 - protein, 118 aa, Zea Mays
MASQPLERRAMREAGFTEQRIPSASNGGRITSHCTPGPPRLKHSFWHTTIFVFWLVLHTYSFATAAHLSNLQRLATTIINRLCSRFEPLGTGPLDVRYIPHVTCSCHFVHTSVFWLSL

SEQ ID NO: 69817 - protein, 319 aa, Zea Mays
MSAISDQKKRTLEALQQQYTAAKAKKLQDEQVKSQKKSNFNTPKPKCDAPRGSKGPEITPRRTYAQPSHKGVAFSSSNCQQKPSTSSGEEINPVYAELSCAFHDTLSKGVVSDLDGTEVVHNVIYDIIQKGGDAGKITKGAKKLKLEKGILLDNYVQRGSRLVDSQARSLLIHSKRSKRHMSLKQHKKCGSFDLDGTFHKYDLYKPMHEMWKDYIRELMDLSPKKKFTENLLSADLHGALLIECKAASYKGVNGIMIRDTAETFGIISEDNRFRVVPKAGSVFVLQADRWKFTLIGDKLSPREKLKEDQRQQRAQSLIR

SEQ ID NO: 69818 - protein, 125 aa, Zea Mays
MAPEDIRWEFDGHLSNHDGWGPSGPMLKRHMTNNGAMAGSIRGRGRLSINEPIKDYAPPQNDINRNFDYIDIPNTESVVTEVERVLANPNMPEIEKARKLLKDQEQSLLDAIARLDEASDSDSGN

SEQ ID NO: 69819 - protein, 79 aa, Zea Mays
MTPPPISSRPRQGPPLTAREGEQCGRKRPVAPLTCRRCPSAPVGWFWGITSTWGIFAGFVRSSGWPVIRQFFARVIHPS

SEQ ID NO: 69820 - protein, 167 aa, Zea Mays
MLLPLNATADAPIYVNPKQYEGILRRRRARAKAESENRLAKGRKPYLHESRHLHAMRRVRGTGGRFVNTKKEGRGTGVASNGGSKTAAAAPSRLAMPPSFQSSVASLSGSDVSNMYSGGLEQHLRAPHFFTPLPPIMEDGDHGGPPTRISSSFKWAASDGCCELLKA

SEQ ID NO: 69821 - protein, 554 aa, Zea Mays
MGRDGEQTRRRSRKRSRDASPSSSDSDSFDSPSSPSSSPERRSRSSKRNRSSSSHRHSRKKSDRSRRSRDEDRRRRRRRGQERKRHGGDGGRSSDSQSSEEDRAEEAREIVRDILIELPAIAEELRQLLQIIDSGESIDISGISDKLLVKRLKKLFRSLRLKESANNKSGKPVSPNREALQQANFDVQNKDKDYIVSEEPKIVDVEEEPPKRRIIGPAMPSRELLAAAAEMTEALRCRDAELEANDDLLIGPPPPAVVAEAASANEAERFEEVTRILAADTNSPYEVLGVNWKMSTDNMKKRYWKLSLLVHPDKCPHPSAQEAFVKLNNAFKDLQDPDKRGAIDEKIKKKEEMEQFEVELKAMREAAEWRRIQGVSLAGDDELLAGPKESQRPTRDEWMTTLPPERKAGVPMHSTTSFSMNGKEGRGDTSVWTDTPLDRAQKAQQSYLEAYNKTKAIAEGDDVKSKNPDASIVDKYNTSKRSVSLVQKHRESKKEKKKQKQQEKEEWEGSHPWKPWDREKDLSAGRQNVALDAENMSQGLSSRFASGAVQRNFL

SEQ ID NO: 69822 - protein, 366 aa, Zea Mays
MSMTIDQELLPSSSLPFYKTKEQKRAATARPAPAGHSSRLESGTMPPSLHPPHLHFHKLKRRHHPAAMAKKGLAAILYKFRDVHCPPSASLPPSTPSAHYAQRCYPPPLSAWPWPSCRHPRTSSFRGPKDDAAAVFRTVNTVYDYDTISGSEQVLRRSSIDEAACIDRRPLSLLGEAIAEQAVDEEEEKETELRETAVVRGMRSERLFFEPAGAEFLPNQSVAVAPARGKDEAATADVKSEEQATTDAPHDKDEPPAEAVTAKGGAVVVTVESKDPYGDFRASMAEMVAAHGLRDWEALEELLAWYLKLNAKGVHAAIVGAFVDLLVSMQPQASSPPSLPSQSPSSSCITFEECSSATFDEDDCKS

SEQ ID NO: 69823 - protein, 480 aa, Zea Mays
MAAEELLRKLRELEEGQAELKREISKLVPEQQQQHHHHHYHSSRRPPQPSPVRRALPAAPSLPSRLQRVGRVGLTDRQHIRALHALGQAVHIIAPGGKLIYWNRYAEQMYGYSTSEAVGHDAVELLVHPDDAEAANNIIGNIFMGKCWRGKFPVKKKSGERFFIVANNTPLYDDDGSLVGLICLSVDTKTLEDIIGPSTSMKSHTHPVKPRFQVNNRPKCNLLNKSSIESEQTVQSSIASKITTLVSLMKKLRHPNIILFMGAVASPERLCIVTEFLPRGSLFRLLQKNTAKLDPRRRVHMAIDIARGMNYLHHCSPPIVHRDLKSSNLLVDKNWTVKVADFGLSRLKLETFLRTKTGKGTPQWMAPEVLCNEPSDEKSDVYSYGVILWELVTQKIPWDNLNTMQVIGAVGFMDQRLDIPSDTDPKWASMIESCWDSDPQKRPSFLEVLDRLRDLQKQYSLQAQMQRNLSADALLKGAVK

SEQ ID NO: 69824 - protein, 128 aa, Zea Mays
MLVRIQLVLLGRMGHGHGGCWRLLTPPGTPLFSSLKVEPKRSLVSQAGTPKARPTALKSRQLDVVMEEGQGEELEVMLSESDDSEFDHDDEFPPSTDGDELSKTEKTKRGGKRSRAGIQLSPSKCKAN

SEQ ID NO: 69825 - protein, 453 aa, Zea Mays
MEGLIKGLVHVAIDAVEDAVRERDHGRADDDEVPRRRAAQSSDPDDDGEEERDERSRSTWAEDNRHERRDDEGWKRADGRNQQQHHAGRQNQCEGEERWDGSGSRRRQQQQQAQGYGNQHQEEERINDGGWQTVGEKKRHGRPQQSEAWNGYRKPPSEQKYSEDVGHIHQGLNFEPTREELNSLSKACSRLWELDMNRIVPGKDYIIDCGKGKKVYQKGDMASESLFSWLGDDVLRKPTYSRFCALLDNYNPHQGYKEVVTQQDKHEEIAFVEEIARTAPIKYLHRYLVQKGAVPQDYEDFKRMLTSLWFDLYGRGGNSSCSSAFEHVFVGEIKGRGQGESEVSGFHNWIQFYLEEAKGNVDYQGYIFPRRRGESPDSEIQLLTVQFEWHGVLKSVSSTLIGVSPEFEVALYTLCFFVGGEDNRVDIGPYSVNVKCYRLGNNKIGSAFPIVEN

SEQ ID NO: 69826 - protein, 879 aa, Zea Mays
MYGVNKFTESEARSLWEFVWEALQDTTLVILIACALVSFVVGIATEGWPSGAHDGIGIFTSILLVVSVTATSNYQQSLQFRDLDREKRKISVQVTRDGFRQRILIDDLLPGDVVHLGVGDQVPADGLFVSGYSVLVNESSLTGESEPVVISEDNPFLLSGTKVLDGSCIMLVTAVGMRTQWGKLMAAITESGDDETPLQGKLNGVANTIGNIGLFFALLTFVILSQGLVGQKYSDGLLLSWTGEDVLEILEHFAIAVTIVVVAVPEGLPLAVTLSLAFAMKKMMSEKALVRQLSACETMGSATVICSDKTGTLTTNRMSVTKACICGNTMEVNNSSVLSSFSSKVPEFALQILMESIFNNTAGEVVINQDGKCQILGTPTEAALLDFALTIGGDFKEKRQETKIVKVEPFNSTKKRMGIILELPGGGYRAHCKGASEVVLAACDNFIDARGTIVALDKTATKKLSDVIETFSKEALRTLCLAYREMDDSFSVDEQIPLQGYTCIGIVGIKDPVRPGVRQSVATCRSAGIAVRMVTGDNINTAKAIARECGILTEDGIAIEGAEFREKNPEELLELIPKMQVLARSSPLDKHALVKYLRTTFNEVVAVTGDGTNDAPALREADIGLAMGIAGTEVAKESADVVILDDNFSTIVTVAKWGRSVYVNIQKFVQFQLTVNVVALLVNFSSACFTGDAPLTAVQLLWVNMIMDTLGALALATEPPDDNLMKKSPVGRTGRFITNVMWRNIVGQSIFQFVVIWYLQTQGEYLFGLESSEANTVLNTIIFNTFVFCQVFNEISSRDMEEINVLKGLPQNSIFMSILGGTIIFQFILVQFLGDFANTTPLTHLQWLVSILFGLLGMPIAAAIKLIPVEPREDDGRIP

SEQ ID NO: 69827 - protein, 90 aa, Zea Mays
MAKHAYLWNTFLLYACCLPGLVRGRRRCTSCAFICSELRRGSFLMSSPFCVKCFEFWPLPLFTFTCLLFGRDVESMVSPAAPACTLATYG

SEQ ID NO: 69828 - protein, 285 aa, Zea Mays
MMKFKKGGCCGKASKDENTRKDNMILLGKREAKQATPAADAQVSTMRGSMFCGGDLRWWMLAIFFLCTLIAAAEERVVTHLPGFQGPLPFQLRTGYVEVDEDNGVRLFYYFTLSEGSSADDPVMLWLSGGPGCTSFTGLVYQIGPLSFDLDSYMGGLPKLVYRPESWTKVSNIIFLDSPVGAGFSYSVKEQGYNSSDTKAVSHILVFLKKWFDEHPEFLSNPLYIGGDSYAGMIVPTVTSEIAKGNIAPQPSVFVSFFPVSFCCLFSGIIHAYFLLPHQQFDFVS

SEQ ID NO: 69829 - protein, 74 aa, Zea Mays
MDGGGVASGMECTIISGTRLTPSKSFARVLASSVRLGLARSRDVGTLKCSHTLKNAKNTKLEDTNEIRRRTPPA

SEQ ID NO: 69830 - protein, 240 aa, Zea Mays
MEQQMVPLCVKSVKRKRKRVDHSNIILALPAIYPFPQKKTVASAAGKKRAATKKNTTGRNKTRNKAARAPKQGLRKGKRKNAKAAHAPNDDALTEGRIGSVDISNGASNEHPVQEDQKDLIRQQHNFSNTGDDIIVDDRSGDANEPKIVSNEQYISDEEAGTVQLPNPAKQDILEADSAVEQPYVINNEQQIMEEQPGVENQQNVAVNQQHKPDEQAGIMQEQNIGNALEENVPEDPTDL

SEQ ID NO: 69831 - protein, 481 aa, Zea Mays
MASLIPPCLSVPTAPGRARLAAPGAPRRRRMAVVRAKIREIFMPALSSTMMEGKIVSWTAAEGDRVGKGDPVVVVESDKADMDVETFHDGIVAVVLVPAGGTAPVGAPIALLAESEEEVALARARAQALSQGQSQAPSPPHAAAALGPPPPAPVAPPATKGIATPYAKKLAKQHRVDIAGVVGTGPHGRVTAADVEAAAGIKHKRPPPPPPPASVDAAPLVPASAVLPPVPGGTVVPFTTMQAAVSKNMVESLRVPTFRVSYSMITDKLDALYEKVKSKGVTKTVLLVKAAAVALTQHPVVNASCRDGKSFSYNNDVNIGVAVALEGGLLTPVLEDADKMDIYLLARKWRVLLKKARMKQLQPNEYNSGTFTLSNLGMFGVDKFDAILPAGQGAIMAVGASRPTVVADKDGFFSIKSEMLVNVTADHRIIYGADLAAFLQTFAKIVEDPECLTLIPKLQEGKRCQAGIWLRPLRRACLGEE

SEQ ID NO: 69832 - protein, 76 aa, Zea Mays
MLENTSIVCEQDLENKKSSWDLYDNPSNVDDHPLDVDELLDAYNTEDPELRQMARSFLEASDRSFAYDEITLSSSP

SEQ ID NO: 69833 - protein, 158 aa, Zea Mays
MEEWFYVKNNLIEREDIKGIIQCPIWSRFGIRRLATVLGNDVEACQKAFNSVCTFIGTRDLVQEHIAYRVWPLVNDWEMPKETTTGSSQGGLVYLKYTFRYRDQFDEPNDEWLNCIEATSDEFLGAYTRAEDDAMTLAFGGRSKKRLNRVFDVIGFVY

SEQ ID NO: 69834 - protein, 67 aa, Zea Mays
MVRSPRPPSSVAVRSNVNPLEPRLWLGSPYARRTRSPLGPISLDSTAMVAIARLSLMHIAQHSDLVN

SEQ ID NO: 69835 - protein, 219 aa, Zea Mays
MEMRAKKSSRSSTSNTSGSTTTTAVERKEIERRRRQQMKSLCAKLASLIPKEHYSSKDAMTQLGSLDEAATYIKRLKERVEELRHKSASARLLAAGSGTRRGGGGGGASTSSAATTTASGGAGSSEEAGRREDDMPPAVVEVRQHNDGSSLDVVLISSAARPFKLHEVVTVLEEEGAETVNANLSVAGTKIFYTIHCKAFCPRIGIDVSRVSERLRALG

SEQ ID NO: 69836 - protein, 163 aa, Zea Mays
MSALCRPSGAYGSSKHDMMHMRIAIALSDDHKPNRSDEQKRIEDAGGVVVWSGTWRVGGILAMSRAFGNRLLKQFVVADPEIQDLEIDGDTEFLILASDGLWDVVPNEHAVAFVKDEDSPEAAARKLTEIAFRRGSTDNITCIVVEFCHDKMVDGSPPSTNKS

SEQ ID NO: 69837 - protein, 76 aa, Zea Mays
MQRCASARCGESADQGNRPRPPQGSRSPHGDGRARANVERLVGRCCQLFCAYKISRLLHLNCYWKFQVLQYIYCQR

SEQ ID NO: 69838 - protein, 82 aa, Zea Mays
MKGNDDAVAHSVKANDNDMDSVGRDQISSELQIDDQQIDIGTQRQHNTTTRRRRTGNDGLGLVRGLTVGNSAMGSKARRRMT

SEQ ID NO: 69839 - protein, 398 aa, Zea Mays
MGWRRGGGADGVARRWVLLLCVGSFCLGLLFTDRMWSLPEADEVAVLPNLRREEEAERKTGDCNVQGKHDYNDMLRVSDAHHNSQTLDKAIANLETELSAARTLQDSFLNGSPVQEDYKASESTGRRKYLMVIGINTAFSSRKRRDSIRNTWMPTGEIRKKLEEERGIIVRFVIGHSAISGGIVDRAIQAEDKKHGDFMRLDHVEGYLELSGKTRTYFATAVALWDANFYVKVDDDVHVNIATLGNILSKHISKPRVYIGCMKSGPVLSDKDVRYYEPEHWKFGEVGNKYFRHATGQLYAISKDLAAYISLNKHVLHKYINEDVSLGAWLIGLDVEHIDDRRLCCGTPPDCEWKAQAGNTCAASFDWKCSGICNSVQNIWGVHKKCSEDEKALLTVSF

SEQ ID NO: 69840 - protein, 363 aa, Zea Mays
MAQLDLEQQPLCCDTSCLLFPLLSLWPQLDYVLLLVGRCFATSGLAVSLRDGSINLSNAWTRQLSDNTVGNIQLVLGDESSISVGWQKKDEKRTATGEVKFGTNFFGASAHYTHRFSSKSHARIAGRVGSTILDFEIGGGRRISEFSTVRMMYNIGIQGVSWKFELHRAGQKLIIPVLLSTDLNPLFVTSAFAIPSTLYFLLQTYVVKPYYLKREKQKTLEKMEGLSTQLTEARKAAEKAQKLLEPVSNRKKNRQLENNGLVITKALYGSRQKIKMSSELNDIHNDMASQVFDVTIPLNFLVTEAGQLKLHDGIKKSGIMGFYDPCPGDPKLLLVEYTFHGHKYKVMVDDYEALLIPQDIHQF

SEQ ID NO: 69841 - protein, 68 aa, Zea Mays
MASSISGFQIGFKYGKPIDYSCYRFDVQIGYIYLSMIILFATYTLWRCLIFIKLLRIYRVWFRKYREE

SEQ ID NO: 69842 - protein, 196 aa, Zea Mays
MATTALLRALRRPSSEAALRLATKANVQTTNGYRHLNNRNLSVFNEFSKQLKGEAKSNPEFQKSMKEFSEKLDVVKEDLKVRTKKTTETIYKRVDDVWSEAEETSKKVTANIKEKMFAAKEEVKESFGVGKEESTSCRDGLPEGSKHEKTEASSHSDGTTEDATDSHTLFTKLKSTISSASPVVSDPRSPGLQKSG

SEQ ID NO: 69843 - protein, 222 aa, Zea Mays
MRTQPAAAATATATASAVGTPNMPGGQSPSPEVVMGQPLFPSGKAHQNDYPVKPQGYEHEQQPHQVQQVPPPTDSHHPPQGYAQSAAPNHQLPPRPAPAAAAAAPAAVAAAAAASAPSVLQPALGTVAMGQPLPLQVPPQYCLPVPAPQIGGVDIPAALPSAAAPAAGSGSTLSTAIRNEVVRQGIRMAAEVVKDSLFPENGGSVLSMMTDSAGGDAVQVTN

SEQ ID NO: 69844 - protein, 498 aa, Zea Mays
MTIARRLLRSNASAQAISLLKHVTGTASLQGHAHSPLDASVRHFSSAPSAQSDTTEENGFKGHGMLAPFTAGWQSNDLHPLIIERSEGSYVYDINGNKYLDSLAGLWCTALGGSEPRLVKAATEQLNNLPFYHSFWNRTTKPSLDLAQEILSMFTAREMGKVFFTNSGSEANDSQVKLVWYYNNALGRPDKKKFIARSKAYHGSTLISASLTGLPALHQKFDLPAPFVLHTDCPHYWRYHLPGETEEEFATRLATNLENLILKEGPETIAAFIAEPVMGAGGVIPPPKTYFDKVITAFGRLGTMFGCDYYNIKPDLVSLAKALSNAYVPIGATLVSPEISEVIHSQSNKLGSFAHGFTYSGHPVACAVAIEALKLYRERDIPGHVKQIAPKFQDGIRALADSPIIGEIRGLGMIMGTEFTNNKSPADLFPAEWGVGAIFGEECQKRGMLVRVAGDAIMMSPTLIMTPGEVDELVSIYGEALRATEERVSDLKMKSEKN

SEQ ID NO: 69845 - protein, 426 aa, Zea Mays
MDAAVRKAAGAGIARAPALVLALVAAGAFLISYNFFTMLFHGGGGIGAAVTAGTRDPVVAMPAWMRAAADTEARRRPFHVALTATDAPYSRWQCRVMYFWYKRMQARPGGEAMGGFTRVLHSGKPDGLMDEIPTFVVDPLPAGKDHGYVVLNRPWAFVQWLQKAKIEEEYILMAEPDHIFVKPLPNLAHDDDPAAFPFFYITPSEHEKIIRKYYAKERGPVTDIDPIGNSPVIIKKTILEKIAPTWMNVSIQMKEDEETDKVFGWVLEMYAYAVASALHGVHHILRKDFMIQPPFDTKLQNTFIIHFTYGCDYSLKGELTYGKVGEWRFDKRSFPDRPPPRNLTLPPPGVPESVVTLVKMVNEASANLPRCKGEKRRFYWGDLKMAICSDFRVVGEDRPINDLSWSALKFNTPLRALQCVPRWTEV

SEQ ID NO: 69846 - protein, 804 aa, Zea Mays
MYLKESISKKIEESAPSLTIDDPDICERIDIVGSLVAPTDGKLSNDSEGKAGTSSDSGSDSDSDSSNSGSDSGSQSRSAAETGSGSSSNSDSDGSSSSKEGSDAAVDITSDDDKANIAHTKVVDDLNLSSSPRDLKRLDVDDEQIDIETNLDYRSTSPHIGLNKFNTGNDDAAAEGFSAGNLSKPSEMSGSKNMTSTRMDSIGVDTKYNEMSFLDNLFDDSMRIASENSPKGEAGQLTVQHVNKRKSTSKDESKFGPVSIAKPKLKRSSGSENSTAKPESAKKVKADIASSIGSLSEHKRSLPPEKYSNDRFNKGTWDVSRHASQDSSPAMKGRPLAPGNLQRIDQSPNLPVPTMHSERTKENTVKSSLKKKSDKSQKPWHGMDGDFGPGYSHGVDHHANFDGSDDFSTRKRSRHGNLLIDDKMFKRSKDANANVDSMNLTKSSRETVVPDEITAFPESNECNGEQSNSQRDNVERSPYGKKKLQREFSDLELAELRKTSLENDDGRIRKQFESSSSKSLDAKLNVINSYPSMNDRKVPVTVFNDTKRKPSPQEYGIGGHINQEGFPRKAAGYEFDDNRPQQNIPDSQHLPRIYNTDFENLIYPDSSGKTSKRETRMTHGGMLEYADIQKKKTTSRLPQNGTNNVRVSRMQKSISPSDNDERSRNDSLIETKTGRKRRGSSSDDDNLFFSKYDKDAPELKDPIKDFSQYKDYVQEYNEKYGVYSYLNSQIDKTMSEFLKIQDDLNVGKERGKEQYYNTLERLRDMYHESGTRHKLMKKVFVLLHEELQIIKERINDFTDAYSNE

SEQ ID NO: 69847 - protein, 344 aa, Zea Mays
MAATAMIRITTLRCRHDPLSSLPRTTSAACSCTLPPRCRQCRLLPPHSSGCSPSSSIFPRRVRVRPTAALKRIGGGNTSFMGPANNGATTLQRSSSPDLRRSLIVLKSTAGTGGGNASSGLLPTILGVAHLLVSLGIVLATDKFLKQAFVAASIKFPSALFGMFCVFSVLVVFDTFVPALAKAFMDFFEPATLFIQRWLPLFYVPSLVVLPLAVRDVPAASGVKIFAITFGGWFATLAVAGYTALAVRKLVKTQLIPAEPMSKASPFSTVETWAWAAVFVASFGVACFNPRALGTTARTCLPFLLAATVLGYMVGSGLPSGVKKVLHPIITCALSADLAAVAYG

SEQ ID NO: 69848 - protein, 432 aa, Zea Mays
MEYERIEKPFPVQQGGGFSPKRLRAMLLGVDKRRKGQDGAAEEDEDGGGDYGALPKAHARSGAGDGGGGGGATCEEYKDVDVVSTTSEFSSSLETAGGHRPRDAHPVATGSRTRVPPEEDSCDSESVASNFEFHKERRAAASAAASVVPPFSKPAPSKWDDAQKWIASPTANCPGRGGAAPAPKKTEKPGSGIGRLPLPATKVVVEATEEIDTKRMDPSQEKREIGWQKAARWAPPDPCPEAEPCPTKTTLLAVETTVAAASAAVNFNRHDASTTLQSAATCIPPPTTVRSVSMRDMGTEMTPIASQEPSRTGTPVRATSPNCSQPTTPRRTMQQLGAERAGAADQNQEGDHAPWHAARQDQHRGMGEQEGGGEGRLALAETGAHGPVDAEHNRDPCGCVGGGGEGQVFSEIQARRDQDPGLGGPSESPDRS

SEQ ID NO: 69849 - protein, 560 aa, Zea Mays
MPPRTVSDGGDDNGTDVASRTSSHRRTEHGHGYKVGVPPEKNLLAEISDAVKETFFADDPLRQYKDQPRSKKIWLGLQHIFPVLDWSRHYSLGKFKGDFIAGLTIASLCIPQDIGYSKLANLPAEVGLYSSFVPPLIYAVMGSSRDIAIGPVAVVSLLLGTLLQNEIDPKTHPLEYRRLAFTATFFAGVTQAALGFFRLGFIIEFLSHAAIVGFMAGAAITIALQQLKGFLGIANFTKKSDIVSVMKSVWGNVHHGWNWQTILIGATFLAFLLVAKYIGKRNKKLFWVSAIAPLTSVIISTFFVYITRADKHGVAIVKNIRKGINPPSASLIYFTGPYLATGFKIGIVAGMIGLTEAIAIGRTFAALKDYQIDGNKEMMALGTMNIVGSLTSCYVATGSFSRSAVNYMAGCKTAVSNVVMSIVVMLTLLLITPLFKYTPNAILSSIIISAVLGLIDYESAYLIWKVDKLDFLACMGAFFGVIFSSVEYGLLIAVAISLAKILLQVTRPRTVLLGNLPRTTIYRNVEQYPDATKVPGVLIVRVDSAIYFTNSNYVKESGFF

SEQ ID NO: 69850 - protein, 51 aa, Zea Mays
MFRSVAMSMCCSMALGRKESSSPSCATVVIILDACLNIYLCDDVVAFLIVR

SEQ ID NO: 69851 - protein, 459 aa, Zea Mays
MTAEQEWSEVQVRALDGRSTVVKLPLGASVRDLKAALRTSFLPAQVSPSFHLFLKGAKLRLDAEIGSLAIGDGDFIVLVPFTRTPQQHFSVSTASQDQGHCPPKQPEVSSAANSAWQDIMDDLSAMPASPQSDAASKDFYSSCDPCSGRFTEDMKAGQISTSGSSRKRRKTCKENGNGSPQMVSSSEANGTAEKHNISKKSGVAKSAAMLCHDMQPLKPAEMVEHLKQGLGKEGQIVHIQEISSREASFTELPCNLSEAMREALKSIGISRLYSHQSQAITSSISGRHIVVATSTSSGKSLCYNIPVLECLSQDLMACALYIFPMKALAQDQLRTLIKLKNASHIDVDVKIYDGDTPREDRLWIRDNARLLITNPDMLHVSILPYHGQFQRILSNLRYIVIDEAHSYKGAFGCHTALIIRRLKRICSNVYGSCPTFIFCTATSANPCEHVMVGYSLSLA

SEQ ID NO: 69852 - protein, 261 aa, Zea Mays
MFKGLKQTVVNGLVATKPPPVEQETDTEFLAHKARFDDLQQQLTITSQQAEALVKAQDDLRETTGHLGMTLIKLAKFEREQATCNSLRRRAGEIHNFANSVLKMSRSQIKLNSEMVKHLGSIHEYLEMMISVHHAFTDRSNALYYVQSLSADLFSLHTRAGGLESSSARDMGHEWSTYQKVEGLKEAIRSAEAAKSDAVREYESIKENNMIEIKRFDKERRHDFIEMLKGFVVTQVSYSDHFANMWTKVTEETEVYANRSN

SEQ ID NO: 69853 - protein, 361 aa, Zea Mays
MPKAGSGVADEEDFRAEVDERLINEEYKIWKKNTPFLYDLVITHALEWPSLTVQWLPERTEPPGKDHWVQKMILGTHTSDNEPNYLMLAQVQLPHEDTEADVRHYDDEHSDNGLFGAATGEYGGCISAAEYWWTNCSEPAKPTTKVQIVQQINHDGEVNRARYMPQNSFIIATKTVSAEVYVFDYSKHPSKPPLDGACNPDLRLKGHNSEGYGLSWSIFNEGHLLSGSEDAQICLWDIKANSRNKSLDALQIFKHHDGVVEDVAWHLRHGYLFGSVGDDHHLLIWDLRSPSPARPVQSVVAHQGEVNCLAFNPFNEWVVATGSTDKTVKLFDLRKIHTSLHTFDCHKYVSAFFVLFIATVC

SEQ ID NO: 69854 - protein, 987 aa, Zea Mays
MADTRKFVLPGQPPDISQILQEAQNRWLRPTEICEILSNYKLFSIAAEPPNMPRSGSLFLFDRKVLRYFRKDGHNWRKKKDGKTVKEAHEKLKAGSIDVLHCYYAHGEENENFQRRTYWLLEEDFTHIVLVHYLEVKGCKQSFNRVKEELMQLSNVDSPSCSNSITSQNQMGPQNMEAAESPISGQISEYEDTESDNCRASSRYHPLAEMQQLVDGVITENMLYPSASTVGSRQGYHGEMLPITDNLDNRSFSNHDIARMLDGANIGLSDVSSTLFDSVPFNEPFTNYSAGFTEPTLHSSFACLEANDLDDSSCLQTFTSEALYTNHLNQKEADALGFTGILASEVNRDRYNDGSIKHSLLKQSSLDLLTIEAPGLKKNDSFSRWMSKELEELDAYVVNPSLSQDQLFSILDVSPSCAYIGTNTKVSVTGTFLVNKKHVESHRWSCMFGDVEVPAEVLTDGTLRCYAPAHQSGRVPFYVTCSNRVACSEVREFEYRDSEAHYMETSRSQANGVNEMHLHIRLEKLLTLGPDDHQMLAINSLMLDGKWSNQESSVKEVVSTARVQSLKKLVKEKLHQWLICKVNDDGKGPNVLCKEGQGVIHLVAALGYDWAIRPIMIAGVNVNFRDAHGWTALHWAASLGRERTVSVLIANGAAAGALTDPTSEFPSGRSPADLASVNGHKGIAGFLAESALTSHLSALTIRESNDSTVEACGLPFAEDLTGIDSVHLAGEGPDAESLEGSLSAVRKSTQAAARIFQAFRVESFHRKKVVEYGDDTCGLSDECTLSLVSLKNVKPGQHDTHLHSAAVRIQNKFRGWKGRKEFMIIRQRIVKLQAHVRGHQVRKNYRKVVWSVGIVEKVILRWRRKRPGLRGFRPEKQLEGPSQIQPAKAEDEYDFLHDGRRQAEARLQRALARVHSMSQYPEAREQYHRLTTCVAEMKQSRMMQDEMLSQAAGGADDFMAGLEDLICIDDAPPRCLPFGEAEPFYIR

SEQ ID NO: 69855 - protein, 246 aa, Zea Mays
MLLQGGEVVNEEEVTVLENSYGVNGNGVPAIYPMDGHAENGHKTMAKGLDGKNGFVSKSLEKRAVAALNKFGENAKMMSDPMWIRRLQPTPEPTVMVAEKPTLASIWSAKGGTGRLFVLGEVVHIFRPLVYVLLIRKFGIKSWTPWLVSLAVELTSLGVHSHATDMNHRLGKVHQLSSAERDELKRRKMMWALYVMRDPFFASYSKRHLLKAEQVLNPVPLIGFLTGKLVELLEGIQTRYTYTSGS

SEQ ID NO: 69856 - protein, 472 aa, Zea Mays
MVVVPFSLRIARNPIRLRLLPVSAARFTRLAMSTTPPAAATISVEYAKSGRSICKGCSGVIASGALRLGASARDPRGFGATKWYHVSCLPSSSYPLGPIGSIKGFDSIKDHDRAELRELEKNHKRDNTAVSPPEEQRPKKARIQMFSPAEGVPDNVTVSVEYAKSGRSTCKGCSENIAKDLSCMQDHDRDKLHKLVENHKSDGKAADVLNESNLKREMAHSMDDSNEGAEKDLEGIKIHCMGEFEEGAEKNLEEAKLPAGNKMIGPSISFSLSDIKKEYKNATLPAHWKVFDTVIFREKEDGLHASSKIAAFDFDGCLANTSMKRVGADQWSLQHKSIPEKLQRLYDDGYKLVIFTNESNIERWKNKRQQAVDSKVGRLDNFIECVKAPIQVFIACGLGKGKGIPDDPYRKPNPGMWWLMAQHFNSGIKIDMDQSFYVGDAAGRENDHSDADIEFAKAIGLKFHVPEEYFGF

SEQ ID NO: 69857 - protein, 131 aa, Zea Mays
MDRARSYETGIFKKPSDFLQMFKDVQSKVSDVVLGKEKPVEESTPEYEKLKSYIFELEIHLAEAQKQAYRLVKRHRELGQSLADFGKAIKLLGSCEGDLMEKVFSEVGSKSEMLSIKLQRETTFSLTLKNP

SEQ ID NO: 69858 - protein, 143 aa, Zea Mays
MEIAAHFIAFFFSLRTCTWSAGESGRQGRDAKQKPSPLSRRDAAGKAGRPCKESEKDSRGRETAGSPASGSAPSGLVARRSAQQLTRAVLVLFCRRDREASGPARASAPGPGRGCRCRCRCRCRRSDRARRQAEAGRRGCGRT

SEQ ID NO: 69859 - protein, 52 aa, Zea Mays
MRSRPRPPSPPPTTKRASRSSVPVLLSPSPFFFVSLSPRSSRSSILQDPLQC

SEQ ID NO: 69860 - protein, 334 aa, Zea Mays
MALQAALLPSTLSSVPKKCSIAVAAKDTAFLSVSQKVQALAETGKWHVVMACRDFLKAAKAAKGAGMADGSYTIMHLDLASLDSVRQFVDSFRRAGMPLDSLVCNAAIYRPTARTPTFTADGYEMSVGVNHLGHFLLARLLLDDMQKSDYPSRRLIILGSITGNTNTLAGNIPPKAGLGDLRGLAAGLRGQNGSAMIDGSESFDGAKAYKDSKICNMLTMQELHRRYHEETGITFASLYPGCIATTGLFREHIPLFRLLFPPFQKFVTKGFVSEAESGKRLAQVVSDPSLTKSGVYWSWNKDSASFENQLSQEASDPEKAKKLWEISEKLVGLA

SEQ ID NO: 69861 - protein, 94 aa, Zea Mays
MVRSRVPDALSRGWSFSSVASEPGKSACCAAGRPTTVAAAAPCLASDDDRDSSVSSSFFSSSSTVVCGLCIFYIFKAILLVLSRCCRLLKKLRI

SEQ ID NO: 69862 - protein, 597 aa, Zea Mays
MPVLRSAARRAREAQGHPAAADEKAPEAAAAALAAAPAPPPVEKRRRVTRAEEREREEIRPREVVAGEGGDDEGERGMDEPDSAARSADKLTFDDEDGPTVPEAVQVGSSPKYRVDRKLGKGGFGQVYVGHRMSATGPGAVEVALKFEHRTSKGCHYGPPYEWTAYNAIGGIHGFPRVHYKGRQGDYFVMVMDMLGPSLWDVWNNKSHIMSVEMVSCIAIEAICILEKLHSKGYVHGDVKPENFLLGTPGTPEEKKLFLVDLGLATKWKDIATGRHVKYDQRSDVFRGTFRYASVHAHLGRTGSRRDDLESLAYTLVFLLRGCLPWQGYQGDNKSFLVCKKKMATFPVSLCCFCPHPFRKFVEYVVNLKFDEEPDYAKCASLFHSVLSVVGSNPDVRPINTDGAQKLIHQFGQKRGRFFIEEEADEQPKKKIRVGMPATQWISVYNGRVPMKQRYHYNVSDSRVGQHIEKGNADGLFISCITSCSDLWALIMDAGTGFTSQIYELIPHFLHKEWVMDQWERDYYITAVAGANNGSSLVVMSKGTKYTQQSYKVSNSFPYKWINKKWQDGFYVTSMATAGSRWAVVMSHNAGFSNQPM

SEQ ID NO: 69863 - protein, 289 aa, Zea Mays
MDPAIGLTPYDVHKHVGFLKHLMIRTGRNISTGTPEVMVNFVTSCYKPDVLMPLVDKITKIPEVVSVINNVNSSVGNSSVGEQEYTLYGKPNITEMLRGLAFQISANSFFQTNTKQADVLYKLIEDSAGLKGDGSEIVLDLFCGTGTIGLTFARRAKHIYGYEVVPEAIEDARKNAKLNGINNATFVQGDLNKINESFGKEFPKPDIIISDPNRPGMHMKLIKWLLEVKAPRIVYVSCNPATCARDLDYLCHGVEEKDLRGFYELKSVIPVDMFPHTPHIECVCLLELR

SEQ ID NO: 69864 - protein, 1106 aa, Zea Mays
MDGKGLFAEIGMKEEDIATMLSGKKVSELAEDAFDGSKEERQIFEGVFCLTNVDGGLNDHYHGGIGHTVHAGKVVTSSRKPSSSADNYKAAHCRIVESFTAGNLSSYRVSCLGADEQAHGAMHSPDAVRFKLAVQWTPPRPDRVYTRRVVTRRSERARICSAMDLESIDICNFSRQRDGRGHGQLWNHLRMHAHLLMVDAGWKIEAKERDNRSKVDHVYVAPDNVTRLYSLPRAWKCFGQWLLMTTPCVNGNESIDYGKEWSNMHEFLYDLKNTLLCLQYEVQRTKPALSFLYQWQLLDPFMAVVCIDKKVAALKDGVALKAVNSTVTCLNRSECKMLDAKNSNRSLGVNSTSKYMNPYLSSCKKSLLPLLSESDYQPDKEGNTMPNEEASLFCTNKTSEDEADRRSLCMSEMNEIGIRSTAHHIVMGLHDATAFHGSSQTCSGRKRKFPCIKSKEDNQTEDKSDPLFFPPSYSSTLSHLVENVQINDVSPHGYETTEIPNMGNRTDILDKMYLGENLLFAPETGNMLLETTDDINNEQHDDAAVSEPQSADNDGSGPSGASSLPPEKDAYMGSKEDSINDYHDPSVVSEFQIANNDAKCEPSIAFLPEKDKDLEANKTSLEGPAKTGQLSSEASGSTLMISEPQVLFVSPQDGTLSFMNNNTNNQEMWRFLNVSPDTMDTEMQMDSNSLVYEASLIQGFLYLDNEGSPICWTVMNPEPPRRLICATALEPNSKLSKQYVEMRLENDASTSEHKKGGKLSDKAADIQDNVSRKKQKANIASLNNCVSMDNLTVNPIDPVVLNEGEQTGTAITEQVPVPLNLVLENKNDKDQGEQSSETSEQLMSKEPQKRDIKRQKRTWSHTCKFDDDDLLMTAVIYKLTARYRNSFHRKLRNKFGFRRLPTYHWENEDKGDRKKFPGEARTVLNKLLEMGIVARVDILQCHGPGGKNVLKDGNITASGIQCQCCGTTFTMSKFKCHAGLRQEVPSLNLFLDTGKSYSLCQLQAWSIEQKVRKEHAKDTMSLQADQNDDTCGSCGDGGELICCDNCPASYHQACLSCQFAQRKRDSKNAGAAARPPPRGSSFLNFPWIFQMATGTALAAFATFVVK

SEQ ID NO: 69865 - protein, 59 aa, Zea Mays
MQLLLYSVNCLVMRFLLYLVNCVVLRTHCSSFCIKCSSDEVMHCTCTTELNLCTCACCG

SEQ ID NO: 69866 - protein, 244 aa, Zea Mays
MDGKKLGNRIIRVNEVRTRGPRDFGRDGFRRDPRRYGRDPYWDRRDREQSYDRERDPYHDRDSDRSREHDRERDYEHGGFNREVDYPMDRDHEVDDIHPREHDRAAETHNMDSDNDKYKEHGSRKRFSHPKGRDSKDLSSSSDLQNDVSQIKDKISAKGQHIADLQKKAQKLEDELAAARKVSSERQLAVTDLYKHFLQLQDYNDRVKTAEHRLQSLVDAAMAELDMAEDATTRDGSMYENGVV

SEQ ID NO: 69867 - protein, 255 aa, Zea Mays
MFHRLLRRAMPLPPPQSPLPAPRMPGVTGGRLFASLPSPPPLQSRREVHVWYLLPDELKDASQLKMYTELLSPSERKTALSMNGEKLQKGAVLSRALLRTTLSRYTDCKVDPRSFEFKKNKFGKPEVLWRSDDSRMEWPLHFNISHTSSLIVCGITMDTPIGIDVEEKTRKTAKNILSLARRYFTPSEIDYLAKIPDPDAQQKEFVKLWTLKEAYVKALGRGFSGAPFNKFSIILAANGRIQISVFPGTKSIERF

SEQ ID NO: 69868 - protein, 294 aa, Zea Mays
MDSKKMYVCSLPLMPYVVFGFVGSQLPSAPNWQSYKVDDPNAPRMILLVILYIYVILLAKIKNDRIYIETATAVVISYVSLLQISWSYIWLVPFPIVAIGFIVALCKELSHEDEAGGSHSQEQSNEGEGEATTSSWEKFLLFFSFMLGALTMMMTRLVETGRAIAHRGIVPASELLWKASLVVLLVAVHAVAAELLGENALLLCMPEILPVLLWLSVRLDTADDRIKLVLDSNLLPAALPAVLAMLAKGEPLLYCGREDNAIARSQFYCKNRWSHHQPTKSSMCSMYFSGAHTG

SEQ ID NO: 69869 - protein, 424 aa, Zea Mays
MFWRMTGLSAASPVDTILDKENFTLEELLDEDEIIQECKALNSRLINFLRDKAQVEQLLRYVVEEVPDDAERKRSFKFPFIASEIFTCEIDVILRTLVEDEELMDLLFSFVKPDHPHSTLLSGYFSKVVICLVLRKTAPLMSYVQGHPEIVVQLVDLIGITSIMEVLIRLIGADETIYSNYGDTLQWLENTNVLEMIADKFNSSDSPEVHANAAEILCAVTRCAPPSLAAKICSPSFVRRLFHHALEESRPKSVLLHSLSVCISLLDPKRLASASYQAFKSNLSHGALVMASPETVDGMLESLGNLLNLLDTSAAESVLPTTYGCLRPPLGKHRLKIVEFISVLLTIGSETAEKELVRQSAIKRSIDLFFEVKDLKLLSMFFMNVILLVKFLFQKGFHLCRLSLMGLLFPLKEKHIQELEMLAT

SEQ ID NO: 69870 - protein, 517 aa, Zea Mays
MALGDKMSVMVVNDGDSISYKSSSQGSGANPVYDVLTKLLDKARPGHKSKKTRISLVSRDVGLKMLSDHSEIKVVKSLSVEESEYKRTDDASATTANSNDDITEAFVDENTAKETEYINDGQVPSILEKSSATYPDEHDTAREFNDTEIEDKSISEASDMSVDLKEDAPNNADSSSEVGGMLHKHIMEKTVTEAFQILEHDERNLYTDQEESVSSNEQVDGSSFLSKKISKTEDAIYENTFGLSEGLEESDRRCPHHATCSSSCVPVRDDTDFTDQVTSSISDYRFAGAFYFSDGGYRLLRTLTGGSRIPSLVIIDPVEQKHYIFPEESEYSYASLQNYLDSFRNRSLPSYYRGTSSAISSKEFPRPPFVNHDFHEANSIPQLTAFSFCPLVFGPRGCDSKSEVSFSNTENIVSGWNKDVMVLFSNSWCGFCQRAELVVRELHRSFKSFSSYSDSVSRNAQDVHNEEKSEEYVMKGFPAIYMIDCTSNECHHLLKSAGRTLSGIVTLPCGEQKCNSI

SEQ ID NO: 69871 - protein, 51 aa, Zea Mays
MLHLPKPVSGSDFDRPMNNQRRTLLPLSPSPRRWRAAVPPSSAEVKHTGEA

SEQ ID NO: 69872 - protein, 991 aa, Zea Mays
MELHREPPEAILNAIKFDLMTSTDMEKLSSMSIIEVSDVTSPKLGLPNGSLQCETCGSQRGRDCDGHFGVTKLAATVHNPYFIDDVVHFLNRICPGCLSPREGIDTKRLEREKVQATCKYCSKDGSKLYPSIVFKTLSSPRVLLFKSKLHRNASVMERISIVAEAADRMPNRSKGKGSLEGLPLDFWDFVPSENKQVQSNMTKIILSPYQVFYMLKKSDPELIKQFVSRRELLFLSCLPVTPNCHRVVEIGYGLPDGRLTFDDRTKAYKRMVDVSRRIDDYRQHPHFSVLASSLVSSRVSECLKSSKLYSKKADGETSTDTYGMKWLKDVVLSKRSDNVFRSIMVGDPKIKLWEIGIPEDLSSSLVVSEHVSSYNFQSTNLKCNLHLLAKQELFIRRNGKLMFLRKADQLEIGDFDGDCLHGYIPQSIRSRVELEELVSLHNQLLNMQDGRNLVSLTHDSLAAAHLLTSTDVFLKKSELQQLQMLCLSVSTPAPAVIKSMNFQGSLWTGKQLFSMLLPSGMNFSCDTELHIMDSEVLTCSLGSSWLQNNTSGLFSVMFKQYGCKALDFLSSAQEVLCEFLTMRGLSVSLSDLYMFSDHYSRRKLAEGVKLALYEAEEAFRVKKILLDPINIPVLKCHDETEDVTYRQSDCIQSNPSVIRSSIMAFKDVFRDLLKMVQQHVSNDNSMMVMINAGSKGSMLKYAQQTACIGLQLPASKFPFRIPSQLSCISWNGQKSLNYEAESTSERVGGQNLYAVIKNSFIEGLNPLECLLHAISGRANFFSENADVPGTLTRKLMYHLRDIHVAYDGTVRSSYGQQIVQFSYDSVDDLVDKLGAPVGCRAACSISEAAYGALEHPVNGLEDSPLMNLQEVFKCHKATNSGDHIGLLFLSRHLKKYRYGLEYASLEVKNHLERVNFSDLVETIMIIYDGHDKIRNEGMWTTHFHINKAMMKKKRLGLRFVVDELAKEYDTTRDQLNNAIPSIRISRRFFGI

SEQ ID NO: 69873 - protein, 673 aa, Zea Mays
MGHNGIFRREKRPIKSLVTGRPILLALEDIDGSPSFLEKALRFLEKHGIKVEGILRQSADVEEVDRRLQEYEQGRTEFSADEDAHVVGDCVKHVLRELPSSPVPASCCTALLEAFRLETKDARINAMRSAISETFPEPNRRLLQRILKMMHTVASHTSENRMTASAVAACMAPLLLRPLLAGECEMDEVFDMDGDDSAQLLAAANAANSAQGIVATLLEEYEGIFHDEHLRCSLSPESQIEDSGTEASTDDGNLEAKGNGFHDAENDVDQEMDDDNGVERILSGKLSESSGYAGSDLYDYKAVNAEESDAERPVKMLEGNLNLSKVQNSLSTENGSANVDSLLSENNPSNPTVGHETLSMGEILSSFDPGISVPTHSPEYSVERQTNKTNGSHPHVKRSNFWGRNNARKGQNSESVDSSGEEELAIQRLEIAKNDLQNRIAKEARGNAILQASLERRKQALHERRLALEQDVSRLQEQLQAERDLRAALEVGLSMSSGQFSSARSMDVKTKAELEEIALAEADVARLKQKVAELHLQLNQQRQHQYGSVVDANDRHHRLPGHFSQQNFVQQGFDMNLAFCNQEKQRNEESSVESSQWRNIKQHVLPYGSSRPLTRKLSFDASSSESRGTEPSTSMSTENTSVSINVPKLAEGIEFGRQPMVTSSTLEPPEVGG

SEQ ID NO: 69874 - protein, 998 aa, Zea Mays
MGEAVTAAELLYGMPLIRSVAGDGAGAGVETAGCGALLVELKQLWGEIGKSREERERMVRELEAECMRVYRRKVDEATGERAALHQSLAAGEAEIAALAAALGSDSGPQLKVNKWTMSLTERVSSATALLEELRAVKAERSRQFADVRSEIEKITAEIAGRSYGYEGSPRASEVGEHDLTIRRLNEYRARLTSFQKEKSDRLHRVLEHVTEVHSLCDVLGEDFIAIVNEVHPGLHETSDPGKPTSISDSTLATLAQVVATLAAEKAKRATMLREAVVPLVELWELMDSSEEERRSFRNVAAVLNPDKLDALPSGVLSVATIKKTEEEVERLTRLKAGRMKELVLKRRLELESICRSMHVEPDASTVPEKSIALIDSGLVNPSELMASIDEQIAKAREELQSRREIMEKINKWLLACEEEEWLEEYNTDENRFSTGRIARLNLKRAEKARLIITKIPAVIDSLMSRTLAWESERKKPFLYDGARLVAVLEEHKQARLRQEEERRRLREQKKLRTLLSEKEAMPHLKRPGSSFGRAAEPCKVNRKRVDAGRLASSGGSGTTTSSSSSGGGGASATELIRPRSSAAGAGQCGEFFKDFLEGYSCRKYSIVIVKEYLIQRIGELIPSLLFFYSIYLSSGTGRLRFAGQGAGFRSWSGAPAVHDFASATAQSWVGRDDGGGGGEADEAQGRPDEGARAQEAAGAGEHLQEHARGARCEHRAGEIHCADRLWYQFTVPALLIDSGSDGFIFSNADEILPGLVNPSELMASIDEQIAKAREELQSRKEIMEKINKWLLACEEEEWLEEYNTDENRFSTGRIARLNLKRAEKARLIITKIPAVVDSLMSRTLAWESERKKPFLYDGARLVAVLEEHKQARLRQEEERRRLREQKKLRTLLSEKEAMPHLKRPGSSFGRAAEPCKVNRKRVDAGRLASSGGSGTTSGSSSSSGGGASATELIRPRSSAAGSGQCGEFFKGVRRLSAPPFNYVAVSKGRSMSSSLALS

SEQ ID NO: 69875 - protein, 126 aa, Zea Mays
MKKITSDLLPIDRVNTLAALIFASYPYIHHFNCFSSPVHFSEQNSLVSCLTPFVLLSEASSVLRILDGALGGNTIDGTLGGNTRSFWRDGSFRSVKPPLLSAIEEVLEGECIDSMPEGFEAPSLDD

SEQ ID NO: 69876 - protein, 250 aa, Zea Mays
MATLPSRPGTSSSFGPVPSASSGVSAGHLDAVKPVGRVRVISAPLLQMAKPYLVVASLPLQTPLSSWSVLPTTRLIRKHGAIGKFVEFYGVGVGELSLPARATIANMSPEYGATMGFFLVSMIEAYLRANKMFVDKHEPETERVFSSYLELDLSEVEPCVSGPKRPHDRVPLKEMKSDWHACLDNEVGFKGYAVPKEQQGKVVKFNFHGRPAEIKHGSVVLAAICSSTNTSNPSFMIGAGLVEESMRIGP

SEQ ID NO: 69877 - protein, 473 aa, Zea Mays
MPPLVPSLLLPIPALILPAPPRLSRHRCFLPAVSSSSSSSSSPHSREPYRRRRRDTPSQTPTPAPRPSSQPQPPPRRANAATPGARSQEELEAAIYDFMCRSAKPGAFPTREELVAAGRSDLAAAVASSGGWLSLGWSSTAAEGPATTAAPCSSGGGHPDYPPETGVYYRGDLAPVSVEDSECEVRLNAGIEGMLTRLQKDRERARPPPRTSTHDTQGQSDDDAGNSGAPSHTAAGGRHIPRAPENGSVHGSHSQNGTIEGNSTFQGSNDDAWQTWTLGKGDLSHFEAAEVLPIERRKVSRHDDIASVQNDIHRSSNGVAVSDFSSDGVGTGRDEIHSRLQILELDLSAALKTLRSRFDKVLSDLSNSNGATVLDDISDDWEFEETKVMQAQEELRSIRAKIAVLEGKMALEIIERNKIIEDKQRRLDKVEKALSELRTVCIMWANPASDVLVVGSFDGWTSQDDNLIQTSLQ

SEQ ID NO: 69878 - protein, 582 aa, Zea Mays
MDLSRLDFRPGVLFEADVWRRFSSPVCPGSPRSPSAFWLVVSFGRCIFRLDPVSVGHILQAAFGGSARGFMVLPLADRVFRFSVSSRDVGFHIYNSRCIARSEFKAFFNLWNSGGPNWNYELKLFLQEENANWWFVSSRKKISFADVVRRPPLTGANAVPVRRHRRSFCSAGKLIAPRTSVFNRLGFPFGARGPRSPANSSTSGASSRDLHRETAPTAGFPRPNGCRNGRGCRGCDDCSLSNSKSISNSTVGRHWPRRLQWRPILRNGPLRPGLGPRRMDLSGSAPETSLELALGVTSTKPQPASPPFALRRSSENLSMAYQRVDPGPFLPPGFSAAVVQHRGIMVRSVSQRLPPFHEDWAIINTHPLPEHEVLFPAVRDVVREYLVEHQRVGVRAIQRSHLGQVLVQFRSVLERDNLVILGPQQYLDATFTAAAIGSFGRLILWEEDRSNISRTLLRVRVTSLEEVPQFIVFSEAEGFAGDSWTVQCEIIQQLLLGGQAQDEDPIPPPPEDGHQLPLAFFGLGQPLPPAGLDLNFPPEPEGGVLPAQQDDLGHGEWDQWIVNEQPIQQDPQPPVASQKFKS

SEQ ID NO: 69879 - protein, 234 aa, Zea Mays
MQSERRRREKPKEGGGRRRGDGGGGGRGRQRQPADGGARGRVRVEEVRPEVHQEHPENQELLPVPAQAVRRQEEGGVAPARPQRGPPRRLRWRAPARRRAAGGSGAGRRRRRLQQIRAGRAVLRRRAGRVRVTPDNARRKAGRRRATHASVLAAAASRFHLFRCATDDGGGRWLVLPVPVDALRRRNVMLSADWLLLHAPINSVIVLVIRTMAHMVFLCIKNKILSLSQIKILF

SEQ ID NO: 69880 - protein, 1209 aa, Zea Mays
MHLDGVDDELGGGSCAPSPARFELQEDPSFWKDNNVQVAIRIRPLSGSEVSMQGQKRCVRQDSSQSLTWIGHPESRFTFDLVADEHVTQEGMFNVAGVPMVENCIAGYNSCMFAYGQEKELRRDEKLMFTCKCSFLEIYNEQILDLLNPNSVNLQIREDARKGIHVENLTEHEISNAREALQQLIEGAANRKVAATNMNRASSRSHSVFTCLIESKWESQGIKHHRFSRLNLVDLAGSERQKSSGAEGERLKEATNINKSLSTLGLVITNLIAVSNKKSQHVPYRDSKLTFLLQLPFHFESYTFDISRFLSSCAAETLSTLKFAQRAKYIRNNAIINEDASGDVLSMRLQIQNLKKVISRLQGQLGSDKTESIASHGFVCESPSTFKWDQGHGMFTPLTFDKRATQRNDCDAALVAAFRREQEKEAQLKAVIDAKQTAEQLVAQKTEEVRSFKMRLKFREERIKRLEQVASGKLSAEAHLLQEKENLVKELEVLRGQLDRNPEITKFAMENLQLKEELRRLQSFVDEGEREMMHEQIIVLQDKLLEALDWKLMNEKEPINKGLSLFGESAGDEENEFLRLQAIQNEREIESLRKKMTFCLEAKDNLERHVNELTTELELTKKHNNTYKEFKAAQLQEQGEADLHNLSDAQMELKTLVDAIASASQREAEAHETAIGLAKENEELRLQLKVLIEDNKRLVELYEHTVVNVEANQDGNPVDDLLNAQPAATSDFHAHNSSSVAQESKIVDEKCTNEDNFSRVTSVELRLQLEEMHEENDRLMGLYEKAMQERDEFKRKILEQSDSEAVKHIQLDEKDVEMSEAAENPEVKHIHDSTIAALKEVLQIVRSKLELVQDKVVSAQDAVKYFKALEIASGKAEELSARIELQRLGAQRGQEEITFLKSVLSESQKKKNAFEGKYFLPAASCWNLVLKTKSLAESKFDASFGSMNQKKEQLNHLQTRKIELSAARTRARESETELKSKIDGLKAKLRAHEAQRKEEEKVLFAIDNLDTSTTLMHKPKNYGKATDLLKSEEDRMKLLCELQKAREQRSMVHKEIRSMNECDYIDREIGVLEAEIEDSCISILETDIEKFVRDNTLAEIWEGSAKDLEALLVDYQDCVFQVNLKEEEIKVCSESLQYQARDMDKLQSKLNQAIRELGELLQDRRSLTACSLDEPTLPVGEKVAADLEAVRIHVDEAKQLLILDNQANS

SEQ ID NO: 69881 - protein, 646 aa, Zea Mays
MSDFDEQDDIFLETSDDTRSSAYFSARCSTSEQLSASWGPEDELWTSELLSVNERRHRFLVRMGFAKPIPTGITFSQWQGEILADRAFRDLEDRINSICSSYRPSFSHGASAPDSTRNSVVLELDEIEHHELTGILDEVGTDRTMNTNQSDGFPSFPQLVHLFLQKGSGRSPARGMEIEFSEKQNDPKSFCGRFKRKEEEDIICMHDTRMKSLKSGTLFATKVDQQNKKWMDFSALYMCQEIHAHGGSISVMKFSTSGRYLASVGEDCVVRIWRIHEVESSPDLYIRETPVKSMDRNMGLKMKVGKGRGRALAIIPRKVFNIAETPLHEFHGHTSDILDMTWSKSNFLLTSSKDKTVRMWKVGCDDCLAVFKHRDYVTCIQFNPVDEGYFVSGSIDGKVRVWDVSERRVVDWADAKDIITAVGYQPDGQGLIVGIAAGRCRFYNHAGENVELEKVLKVTKKKSAGRQITSLQFSCGDPARILIASAGSKIRVSDGGAKINRKFEGADSNVYIWDLDRPARGKSRTRGPRRVRSCEHFFSEGVTSVATWPGLAHQQEDLQSPEKGAAPTLCRDRELCSFGTWFSADGARGAATWPEEKLLPSLRYVNCAGMDDCRAKVSAAWNKVVVTGGSDGVIRCFHNYGLPVKL

SEQ ID NO: 69882 - protein, 73 aa, Zea Mays
MEPPTNPLERRANAGLSGKNSSTPSSRTSCPSVTPRRAAQSPRKKSLSKRNRGWRAEGPRGASDAAASLLALC

SEQ ID NO: 69883 - protein, 81 aa, Zea Mays
MGWERCRRSPPARAMGAVGVNSSWRGCALVPRRPAAHAACAPFNEAVVVALAHPRGWLAGSQVPPAVRRSAPAEGNLRNTS

SEQ ID NO: 69884 - protein, 307 aa, Zea Mays
MARLLLSVSVPMSASSSRRIVVPGTARHRGRSGVCVAVPATSTATATQQEFDPAAAPPFGLGDIRAAIPKHCWVKDPWRSMGYVVRDVVLVLGLAAAAARLDSWLVWPLYWAAQGTMFWALFVLGHDCGHGSFSNNPRLNSVVGHILHSSILVPYNGWRISHRTHHQNHGHVDKDESWHPLPERLFKSLDSVVLMLRFRLPFPMLVYPFYLANRSPGKSGSHFHPASDLFQPSESKQVLTSTACWLAMVALLAGLAFLMGPLQMLKLYLVPYWVFVMWLDFVTYLRLRSLCKSWRHGAFPDKSCIAA

SEQ ID NO: 69885 - protein, 110 aa, Zea Mays
MSWATSSGSPPERVVEGKARTRVSAGPLLIPGSSSFWDPAEVWTYPGAPDLYGPVSFLWGSGLTGMCCLPLPHDALWPPHVVGLGAVLRVAWRCRMGAVSSCCRRGYPLI

SEQ ID NO: 69886 - protein, 67 aa, Zea Mays
MSTIPTDPPQREPVRATREHSTPPSSLQPGGYTLLPPSPTPSARLSLHVWNSRVQAYPVPYPGHVAS

SEQ ID NO: 69887 - protein, 101 aa, Zea Mays
MKFYLPWKSCCLCSCLKIHFALKNISVITIDGSNKYNNNNNNQVCQSQASWGRLELKPNKHPQSRFRHIDSRFPSTPIQTQISRVLTLFLKQVPREHLPHS

SEQ ID NO: 69888 - protein, 481 aa, Zea Mays
MAQAAGTADATDEAPLLLASSAAGSTPSPPGSAPRRNRPDADERRGAVHAGGRGAHRRRGRGAGGVHERVHARVHPRRRLGGRPPGPPPHPRARQRLPHGRRARHVARHQLRRAHGGALRHQRRLRVRARRRPRVQRRDIAGGHAWRPLIHARHIHQRRHPAQLRVQLRVRGPPGAHRVASHVRHRRHPARAHRRRGARHHARVTAVARDAGPPRRRARGAVAHVGQPGRRRLPARGDQASRRRAVARCCGAPRWRRCLEGALRPAIHHNHERAARPRLRPRAAVLRAGVRRRRHPPLQPAGLQGGRRGVHLRRARRHRVHRSRQDVLRPRRHALHRPPRPAPAPPRQHRRRRRDRDRPRRDAVRGHGVAGDGRGVPGVRAGLRGRVLHRLRVRGVDVQRGGLAATAARAGLQPGRGREQAHVRPCGVVSMTFISLADAITMPGCFFLYAAVTAAAFVFVYTRLPETKGRSLEDMEVLFRK

SEQ ID NO: 69889 - protein, 54 aa, Zea Mays
MMLVDELRFIGFSPSVRLMYAHRTRSPLNPVSLELVTSLSSESSLNSCPRQSSR

SEQ ID NO: 69890 - protein, 709 aa, Zea Mays
MSSRNEAPSSVAASKVQPSSGTAAKKRQSTLQFKANSKAQQKTAKSVVEMLRKTPEEVVDERLSGSYQPTILASAKSKEDKHYVDMQWALFFYECGVPFNAAAARQFQIAIEATAQFGSGYKPPTPYQLGEPLLQEAVKTTNTMREEHERAWKHYGCTLMSDGWSDRRGRHLINFLVNSPEGTYFLESVDASSEVHDAYMLADLLEKKVDEIGRDKVVQVVTDNGANYKAAGKLLMERIPTLFWSPCAAHCLDLMLEDIGNLKEFKKPIARARRVTTFIYRHGRILAAMREKTGGADLVRPAATRFATSFLTLKSLYKHKDALKALFASTAWTDNRLSKTSAGLDVYNIVFSTQFWNSVEDCLRASGPLLIVLRVVDGDERPAMPEVQALMKCAKEKINQSFAVQSKKTLLKKIITIIERRWEKQMDHPLYGAAMYLNPGKLHPLIRNDDDATVGQLRGCFLDVLARMVDDEETRDKINSQAMDYEFLRGAAFSNKMAKDNLQTMTPLEWWRSYGGRAIELQRFARRLVSLCASSSGCERNWSTFEFIHTKKRNRLLHKRLNSIVFISYNRKMKARFQKLRQKKGKNFDPLVHEDFNWDNEWADSLHVVPEGGRGCECDLTWDLVDNAIGASQALRGRNLPRRAHNVYSRRNSVAAQNMSEAEEEDEDEDEDVPHDDAEITDCEDESNGGNAGEEGEAPNIPGEFDDDF

SEQ ID NO: 69891 - protein, 579 aa, Zea Mays
MGTATMATAVGAAMLLYFVLSRRLAGEDVSARGGGGGGVGSGKRRRGRALRRPVQPPATWIEAVGTLAETLRFTYSETLGKWPIGDLAFGIKYLMRRQGNLHVASVYAGSDCIELKGPQIMEELIVLRRLIDLCFLFSKKPFPVFRELAGFSQEDVLIEEPKAGILKPAHTIIRDECTKSFLVLIRGTHSMKDTLTAATGAVVPFHLSLLDEGDVSKLVLGYAHCGMVAAARWIARGVTPCLREAVRQCPEYQIKIVGHSLGGGTAALLTYILREHKEFSSTTCVAFAPASCMTWELAESGKHFVTTVVNGADLVPTVSTASIDDLRSEVVMKQAQNVAQAVARSRSAFSSWSCMGARRRGVGVVTACSKDDMRVETHVTSTVESKSVLVEHCGAKTIEELQYTAASVSVHDAAEEEEALLSEHETSRENAEEETTEGELWYEFEKDLDRQAEMEARTREEEAAAAKEIMEEESAVLKGVDDRQSFTPDSLERQQFYPPGRIMHMVAMPPTDADPDDPVAADECCVGIYETPRDLYSKIRLSNTMINDHYMPMYKKMMETLIEKFARDEDCYCTGSTAE

SEQ ID NO: 69892 - protein, 701 aa, Zea Mays
MSSAVKDQLQQMSTTYDSLLLELNMIWDEVGEPDMARDRMLLELEQEWLDVYRRKVDQANRCRAQLRQAIADAEAELAGICSAMSEPPIHVRQSNQKLHGLREELNAIVPYLEEMRKKKVERWDQFVDVIEQIKKVASEIRPSDFVPFIIPVDQSDLSLRKLDELTKELQSLQKEKSDRLKQVMEHLSTLHLLCEVLGVDFKQTVYEVHPSLGEADGSKNLSNSTIERLASAVNRLRELKVQRMQKLQDLASSMLELWNLMDTPLEEQQMFQNLTCNIAASEHEITGPNTLSTDFLSYVESEVLRLEQLKASKMKDLVLKKKTELEDHRRRAHLIGEEGYAAEFSDEAIEAGAVDPALVLEQIEAHIATVKEEAFSRKDILEKVERWLNACEEEAWLEDYNKDDNRYNAGRGAHLTLKRAEKARILVNKIPGLVDVLTTKIVAWETERGKEFTYDGVRLRSMLEDYIIIRQEKELEKKRQRDQKKIQDQLKAEQEALYGSKPSPSKTQSTKKVPRQSMGGANRRLSLGGATTQAPKTDIMHSKTARAAKKAEDLGALSPSSRGLDIAGLPIKKLSFNASTLREAETPRKPFAQIMPGNNVSSMPARPISNDTEEENKTPKTFAGLNPKTPVTVTAPMQLAVTPAVANKVIATPATLFQEKAESPALPGDIEYSFEERRLAVYLARNNRHPGICRSVGVFNL

SEQ ID NO: 69893 - protein, 65 aa, Zea Mays
MVAPSTKIGLYNSLPQPQHRDFSLHVSCACSGPSAALLSPMLRAVLLLLPARCGPLLVPAMELAS

SEQ ID NO: 69894 - protein, 100 aa, Zea Mays
MMVGGGRSACDPRAQAGHRAQPGEEAGGLRAGAQPVQAISLLVKLLPAEQRRGVCGAVHQPGGVPDAGGEEAEQGRRWVPHQHPVAEELLAPGLTTMHFT

SEQ ID NO: 69895 - protein, 497 aa, Zea Mays
MADSAPSIPGVIASLQAYSTALSAFTAAWRAVETHASTLDSALAARLAGFSELELICSAMDGAGLRAYLTEHRDELKDPTRALDAALQVAPDPGLLVLSAAASFCRTLPEVAKSDGSVKASCRLLIALLDRLRAIGVKPSPEAREEARAVATDWKRGKRIGTETMFKQETFAFLHLVGVFGLVEDVGGTSEVLDLVVSISGRERAVDAFVVLGLDLDQHMPILIQKMVNKNKQLEAVKFIQALNIAHKYALLPIMRSYIDHAAVAGKMIRIRGDDLATQKFIKEQKLEELPIFEEANKRMAHLDQQSAERKRTAAAAAAAARKVSKNIEEQQKRIQELMQPAKRPRSENVVKGSSGQNVNFAGTSTQQFKPQQSIHKAGVSNQYQAALTQNVLPAIAQISQLVAGSHRPVGIPNQALAVPPQYGSGSANYYGVTSTRPYRPITLPPGPGALNGPSAQASSRSRLYSGDPLAAVSRSSDKKGSSYKYSLSSMSTYDRK

SEQ ID NO: 69896 - protein, 870 aa, Zea Mays
MINLFELSVGASAKVSSRDGSPVRGTQSERKEYAGSKALTGSTRRSSSDRSGGTPMKMLIAQEMAKEGDANQKTTNVVARLMGLDDNVDLAKPVVPPNRRSFPDGHLSATLARVNNQIPFEKHTSSAEDVEYKDVYEVGYQPPRGDEYPRRRRPSEDHDKRRMDLVRQKFVEAKRLASHDNILQSKEFHDALESGGLGSAPTSPQRKHITVLKPSKSVEMKGDKAIRRQTNHAAGNRTDRSNVHKSDAAHVKEDKLPKHTRIVVLKPTSVIASMEQSEQSYHADLDDSEAPVLSRHLSDEIDWSVHGISRRHTESLQGCIQSNMFGADRPYHQYAEEEGNSLSDSDIGTPTSHHSWEYIYRFSNPYFGSLSHASCSPESHVTREAKKHASDRWATVPSSEMTQDKVPVRRSLSTLGEMLAMPDMKKEEAAEQASPDATHQLCEPTVGVSSNCAVGEGEGESSLRKISRSRSVPVSSTAFDSLRLDGGCLDAQHKEPTVPKEVKPKSGKSSLKGKITSFFSKRKKAEKEKPSPSPLGTLNGRGSSVSTVAVAKPDAPQHVCASSQDDVSFESLEDQFNHGPIGAPVDEPEAPSVSKPPASLEKTLSFEIRASHFDQPSPTSVFDVQFEDISEKSPISSESAITAKQEPLSRSIPIGSIARTLSWDDASQEAPPQCSTKGDSNHEQEQHEFVEKTLASAGFCNEKTQDIFARWHSLDRPLDPAVVEQLLERKVEDAKCRERRSNQRLLIDSVNAALLDIGQSKVWGGAYPCTARHYSNAPGVGTCDDDVLVTDEAWRLVRSWLFDDENDIAGLGDNAGLAADWVVGREIHGKGWAETLRMEVDEMSREICGEVLGELVGEAFSELAGAAGWH

SEQ ID NO: 69897 - protein, 458 aa, Zea Mays
MFKFLKEVVAGSGSGLKDFPYTIGEPYASAWGSWKHHRGTSKDDGSPVSIFSLSGSNPQDRHMVAGRNGVKRLRTVRHPNILSFLHSTEAEAADGPAMKYTIYIVTEPVMPLSEKLKELNLGGTQRDEYFAWGLHQISKAVSFLNNDCKLVHGNVCLASVVVTQTLDWKLHAFDVLSEFDANNEASGSPMLQFEWLVGTQYKPMELSKSDWASIRKSPPWAIDSWGLGCLIYELFSGAKLARTEDLRNTASIPKSLLPDYQRLLNSTPSRRLNPSKLIDNSEFFQNKLVETIQFMEILNLKDTFEKDSFFRKLPNIAEQLPREIVLKKLLPVLASSLEFGSAAAPALTVLLKMGSWLPADQFNIKVLPTIVKLFASNDRAIRACLLHHINQFGESMSAQIVDEQVFPHVATGFSDTDGTIRELTLKSMLVLAPKLYLQMTDCLVRYCSYLSVQSQDLS

SEQ ID NO: 69898 - protein, 73 aa, Zea Mays
MACSSAWWRPSDLRFDRRSKPSAHRRAPLARFCPALCILLCADCSSPSSARRVPGSSSACVPLSSPMVLGVSP

SEQ ID NO: 69899 - protein, 183 aa, Zea Mays
MKNSWGKNWGEQGYVRIKMGTGKPEGVCGIYTMASYPLKNATRWGRCPESKNEATQYGLDMTEQQYLEHSIPWIAANDAAWRAFCRYWASAEFKAKSVRHSSNHGTESYHKYGGDDHFRLAKRMEASTGAVPSDVQIYLRGHRGPDPANLDVLYSQKQQIVWLHMVRRCLVSMDQTMIGGPHI

SEQ ID NO: 69900 - protein, 468 aa, Zea Mays
MASDPAPDDAAAAVNGHGNDNGHGNGPSPSKRPRAVISEAEIRVEFAHHDAAVARVNNGSFGCCPASVLAAQAHWQRLFLAQPDAFYFHVLQQGLLRSRAAVAEVVGAGDVSEVSLVDNATTAAAIVLQHAAWSFAEGHFARGDAVLMLHYAYGAVKKSIHAYVARAGATVVEVPLPFPVASADAIIAEFRAALAVAKEGGRRVRLAVIDHITSMPSVVIPVKELVAICREEGVDKVFVDAAHSIGQVPVDVRDIGADFYTSNLHKWFFCPPAVAFLHTRKDDPIASQLHHPVVSHEYGNGLPMESGWIGTRDYSAQLVVSEAIDFVNRFEGGIEAIRNRNHEKVIEMGRMLAEAWGTFLGSPPELCGSMVMVGMPGCLGVESDDDAMRVRTMLRKDFQVEVPVYYNSRRVEGQEMTKDKNGDPVTGYVRISHQVYNVTEDYERLRDVVNKLVSEGFTSSKLRPSEKT

SEQ ID NO: 69901 - protein, 124 aa, Zea Mays
MVRAPDQPARHDPFVHLYLRTIMMVLTSVAATSFVILLIFSLPSCLRLRATHSRQTAWEQASPLRISPTPAPTPTRAVAIARPRGCFIACTHHRFRCRRTSRSSSWPSPFSFSPTCCPCLRSQP

SEQ ID NO: 69902 - protein, 77 aa, Zea Mays
MKAARGRRWESRTSAPPSIPPTTKLAAYQTRQLRARSATVMPREGDGGIAARQIRLLARERKEGRSGLSRCKSVWIH

SEQ ID NO: 69903 - protein, 1139 aa, Zea Mays
MGKPCFSGLVAIELCSMGGIAECGVSIDTKASPRRAAIEKAQDELRQEYDVREERRRELEFLEKGGNPLDFKLGHVASLSVQSTSVTEQIAEQNVISEAKGSSAFATSPHGDSVESNDKPGNSLCREGNTADNITLLDGDASSMGVDKIVKRGTKRTNSAQAEQFLHCDGQNNAKEEDSGLYRLGPKSQAYARRRSKPIRENAYSVSVRYPPIPPLSSQQKDVTGLIPETKTEDNGVSSIGDSKPTSPNSKNLVTNASLLNDKVEMETENVQAIPEGNQAPKNELSNSNNGSPAIEISPNSVPDNSRLTVSDQMVTAFVSVESPDAISKVAASRIVCSLPYISNEILKEAQTLEKAGNNPSMVSVVDVHAYGMDNNGAAPYSAVKSASLNENEVDPIHEYAAKAVTEHPDQNENLVPVNADEMADEGLNKILPDDKDDKKDCQLEVSSGPVILNDSSTPVYPEFSNSFYARDGTEVSNNAVDSKNNAEQLASSNQGKGNMEECKDSDGNNASELSVAQKLVSVIVPPASDAGDVSNFVENDVDKSSRDQEKVAKKEYEDSVVAKKDHEDAILRRARYIEANIKRAGEWSLCNISLEKKQKSHWDFVLEEMVWMANDFTQERLWKNTVAAQMSHWISSRGRAVFEEASIQRKQKSVARVLANGIMNFWCSVHTLRASGGIPKPIKIEQPNELEENKLGGFKSGKADEECLEQEKSRQSPIQSFALRFLEYNINASEFLPLAEAPSTPDRLNDFGILKANLFYGVAPGAMQAYRESMDRLLIYNNKKIGDTVLKDDYEPSTYASVTDVPMENAYGDDESEAHTYLLPGAYNGGLASKNSHKKKHHLPQRMNGARSYEIGVDSPYEPLYLESKSGNQQLLSNGKQTDFLSIPIKRIRTAARQRVVSPFPAGASGTPQFTNKTDASSGDTNSCQDDQSSLHGGSFSRKNADIESTVDFDRQLLYDGSEVSTKSKKKKKTKHPGYKALPNVSESCSLRAPGKGNYDHRSQIDMIAQYEQKDYIKKRQETNGNFVVNGLHAAKKPKLLNQAPDISLEALKPIGPMASLAASQMSNMANPTRVIKISTRGRKSKGLKMRAGHSGPGSPWSSFEDQALVVLVHDMGENWELVSDALNSIIQLKGFGS

SEQ ID NO: 69904 - protein, 393 aa, Zea Mays
MEEGGRHDHDAGDRISSLPDDLLFSILLRIGSIRAAARTSVLSRRWRHVWARLPELRLGTCDEQPGATFLDFVDAVLDACSAPAVHRLEVAMYCHGLRVHACRLVPWLRFASQRRVGDIHIQVPSQKKFFLSKPIKEELELPVCDGATRITLSLERRWSLRLCPAGSFMSLTDLHISCATMAGSELGNLVSEQCPLLRNLYLFVRLAAASNVSIHSNSLQSLSFNVQNTQKLEVMAPKLEVLAVCDATKAHISAPKLSVVSWDNDTGYNPLCHHFANAARHLRLLHLGSKCVSASLMRQFDEVDVLKLKLNLLNIKGTEAYTNLLNETAALPKCEELKLRVSLRASQHNFASIMFHILRSCNNTRRISIKIDSSMLNLRDKKGITVWWCSDFC

SEQ ID NO: 69905 - protein, 122 aa, Zea Mays
MLIFTAKGRLEKGQYFPVTAVQRFDAAGKRIENGIYLGPIGCLTFEGRLSWKKKILAFIFERVRIKVGPFGPLEISLGSGDGGREPSTKDPFFVWFYVDEEIAVAQGRGGGVAYWCRCQRVP

SEQ ID NO: 69906 - protein, 298 aa, Zea Mays
MLSCIACVNKEEDGGRDREEHGGDTPSCRDPVKSLTSQLKDMVLKLSGTHHRQHGAQHRRGGSPPPPRGRATSLYRSGYYRPGVVQDDMAVPPATYLGGGGAGASSASSTPAWDLPAAARADGEACREWVAQVEPGVQITFVSLPGGAGNDLKRIRFSREMYDKWQAQKWWGDNNERIMELYNVRRFSRQVLPTPPRSDDAEVSRCLYPCLPSACMSPLSHSHACPIPWCEASFCHTVTLTCHTTPRHRRPPAFLRTRQELTSRSPLPQSKIQILELDLSVLCMHVSMRRKTQRSQLY

SEQ ID NO: 69907 - protein, 142 aa, Zea Mays
MSRDRKQACIVETDSQVMQVEEEHIEPLREQSGTQQPPSFGQCGKNGEPLEHMQILIDNLVGYDTIPTNSLVISPGHGYLYNFEMKELYGLSYRHETPEGPTRFGEGMLTPLDPNPLFTPNLSHLEHLLFLRFISNLHRFKC

SEQ ID NO: 69908 - protein, 356 aa, Zea Mays
MADDQKSRWKKEVDWLLSVADHIVEFVPSQQVAENGTSVEIMITQQRQDLQMNIPALRKLDAMLLEYLDSFAGKQEFWYASKDADGPGKGSTPRQDDKWWLPTVRVPPDGLSGAYSKWLQNQKDLVAQVLKAAMAINANVLMEMEVPESYTESLPKNGKSTLGDSVYRLITDDHFDPEELLRSVDSSDEHSIVDLKNRIEASAVIWQKKMTHNKDSKLPWGHSHEKRGMFEGRAENVLLLIKHRFPGIAQSALDISKIQCNKVCMGLGCLVRYTPFVALFVHSNALRTSLLYSSGCWPCHFGELLQDSGEPGFHGHVSDRGRSERGLGRSRSQEHGIDENRRQLSFGRHRQGRLRR

SEQ ID NO: 69909 - protein, 396 aa, Zea Mays
MSDTLRAKRELAQQTTPACSAAIQRSEATNPRNLQRRHRHCVMPVPPLLSPLRLPSPAPPLHRNGAPWRRPTQLRAALRVPPPLHLGLAAARGDGVRRFVGTLGSKRARAVGAIRVSAISGDGGGGAGGTGIAAAAAATVVFAVMNRVLYKLALVPMKNYPFFLAQFATFGYVLVYFSILFIRFRAGIVTREMLALPKPQFMLIGLLEALGAASGMAAAAMLPGPSIPVLSQEFVFIDGAKRLEGKKPDIFVVNSFGSGFQALFIFLLLPFLSNLKGIPFAELPAYLTRGAACFLNVGGNLKDCHGAPLLPLLYITLNMAFNISVLNLVKMSTAVVASLTSTLAVPLSIYILSLPLPYLPEGTNLSASFLIGVATLVLGLLLYNLPQESTNQVKED

SEQ ID NO: 69910 - protein, 349 aa, Zea Mays
MLCQGISSYFMCGFRDYRESITTFLNIEHKITSGFFVENTVIVAEGELLSNGIFQVNTCGFPPLEDREASVSLLMGFDFFGGGVIPTEETLRLSSLEKKAVNDMFVILSDVWLDNPETMEKLAVVLDGYDSVEVVPSLFVLMGNFCSRPCNLAFNSFEELRFQFGKLGEMIAARSRLKEHSRFLFIPGPDDAGPSKALPRCALPKYLIEELQKHIPNSIFVSNPCRVKFYTQEIVFFRQDLLYRMRRSCLIPPTTEETSDPFEHLVATITHQSHLCPLPLTVQPIIWNYDHCLRLYPTPHTIVLGDKSEQKAFKYTGITCFNPGSFANDSTFAAYRPCTKEVELSALEG

SEQ ID NO: 69911 - protein, 374 aa, Zea Mays
MVFIFAEQKVLDAAMNDINNSFGKGSVTRLGSAGGAFVETFPSGCLTLDFALGGGLPKGRVVEVYGPESSGKTTLALHAIAEIQKLGGNAMLVDAEHAFDPAYSKALGVDIENLIVCQPDNGEMALENGTEQLLTASAPQNSAILVADRMCRSGAIDLICIDSVSALTPRAEIEGEIGMQQMGLQARLMSQALRKMSGNASKAGCTLMFLNQIRYKIGVFYGNPEVTSGGIALKFFASVRLEIRLIGKIKSAKGDEDVGVKVRVRVQKSKVSRPYKQAEFEIIFGEGVSKLGCVLDCAELMDVVAKKGSWYSYKDIRLGQGREKALQYLRESPTTCDEIEKVVRAMIPEGSRHMSLLAFGQSSSTEDEQAYDEQ

SEQ ID NO: 69912 - protein, 628 aa, Zea Mays
MLQIAHDTLTNQSSRTEYDRALSEDRDAALTMDVAWDKVPGVLCVLQEAGEAQLVLATGEHLLQDRPPKRFKQDVVLAMALAYVDISRDAMAASPPDVICCCEVLERALKLLQEDGASNLAPELLAQIDETLEEITPRCVLELLALPTDEKHKNKRQEGLQGAKNILWSVGRGGIATVGGGFSREAFMNEAFLQMTSAEQMDFFSKTPNSIPPEWFEIYSVALAHIAQAIASKRPQFIMMADELFEQLQKFNIGSQYPYENEMDLALERALCSLLVGDICNCRMWLGIDNESSSYRDPKNIEFVVNNSSMNEENDLLPGLCKLLETWLVSEVFPRSRDTRGTQFRLGDYYDDPKVLSYLERMEGGGASHLAAAAAIAKLGAQATAALGTVKSSALQAFSKVFPLTEQLDMSGKDIPSDDLDKSLEKLAQGSVAGDAIHDSRNDALKIISAGTLLALFAVLGLKCLPRNKSLPALRGEYGSVAVVDSIDAADEEPLEIPRMDAKLAEDIVRRWQSIKSKALGPEHTVTALQEVLGGNMLKVWADRAAEIERHGWFWEYALSGVTIDSITVSVDGRRAAVEATIEEVGRLTDVTDPKNDDAYDTKYTARYEMTYSRPAGWRITEGAVLRS

SEQ ID NO: 69913 - protein, 182 aa, Zea Mays
MGIDPATHKPLHPQPAAPPPTQQEQDTGGSPEEEGEKADAVMMAAATPIIGHETAPFFTDEEEMLAHLLDDIDDFPPAAYSPDDSSSPSSSSSASRSSHSASVVTAPSSSGAGGSSVADGERPLQMVEWPESMWLDDDVVPGLATTPWEFEDDNPFLAYQRNNALFDHQLEAWNNDGRVELF

SEQ ID NO: 69914 - protein, 343 aa, Zea Mays
MYVKSLEDFIQLLDIFVPDLLSTVILPQNISRNWSLSPAAIISLPLNDSTSSSSKSSCPSPALVCAGRRPACRSHPPVILSAAAQPSSSFSFSLQPVFLPARSISRSRCRALAAPNHGGTAPSRGPPSSFQFSLLAPCTPLKPLLLPSVQWSPPLFLFLCRASPLPLSRARPSHLDSSRRPNVSLPVLALVARHRSAHPLGALRAQPSDFVRASLPPAHSSFVPISLRHVPLPLHALLCQCRVLVRPALHALLAHGSSPSSISARSCPYRASHGRALGFAGVCFPRRASARSSRPASPCCGLSSSLRVVELSAHAQLALSLLAACTNFIYSPQRVKLPRRIFF

SEQ ID NO: 69915 - protein, 308 aa, Zea Mays
MLSNREVRKIHLPPETKAVRDMCILPGGSAIFTSLGRRLSLFSMATDSIVLNWDLPAPGWSCAVGASGSHHIYAGLQNGMVVVFDIRQTVRPLRCMVGLSANPVHTLHSVIDNNGSRKVLSASAIGPCMWDADSNQSRPHLLTGTGDERVCISLACAAPWSDLLVASFRPRVDPSGDAVAASQVYLSQTPTRSGQGKPGQHTLIRRRTGNTCFAEGTTCYANVSELRMSKSAIIPYGYGGHQQKHLFSYGDESLRGVRTWQLPSFGMHADLCTHREPILDLRYAAETEGPGGYLGCLSEEKLQVFRVN

SEQ ID NO: 69916 - protein, 268 aa, Zea Mays
MDSKSVGIVGAGVSGLAACKHALDKGFRPVVFEADGSVGGVWAHTLESTRLQAPTTAFRFSDLAWPPESAREAYPGHRRVMEYIRSYARAFDLLKHIRFNSQVLGVEYLGATEEEVMGWDQWSGDGTAFGAVKGGGWRLTVQDLKVGSTEVFVVDFLILCIGRHSGTPNIPEFPANGPELFKGKILHSLDYSYMDDGDAAEFVRGKRVTVIGSGKSAFDIAAEVAKVNAMHHRVQNKALAGPQVQRVGSRPQLLLPEPHLAAPGSQTW

SEQ ID NO: 69917 - protein, 155 aa, Zea Mays
MARALLLLRVAVARYPPLPASPALLQPLLRRHAPSQYRSQLRFLSSLSSSSVSTSSDAPSDGGGGRDGEEDGAKSGGRVDYLGMSDEELMEQCDMGTFKASGPGGQHRNKRESAVRLKHLPTGIIAQAVEDRSQHKNRASALSRLRTLIALKGGR

SEQ ID NO: 69918 - protein, 323 aa, Zea Mays
MLISLKEFFIVLGMLLGYIAGNLYVEVVSGWRYMYASSTPLCLIMGVGMCWLPSSPRWLLLCAIQGKGNLPETKENATRCLCRLRGQASPDLVSEQIDLILEELSYIDQEKQASFGEIFQGKCLKAMIIGCGLVFFQQVTGQPSVLYYAATIFQSAGFSGASDATRVSILLGLLKLIMTGVAVLVVDRLGRRPLLIGGVSGITVALFLLSSYYTLLKDASYVAVIALLLYVGCYQLSFGPIGWLMISEVFPLRLRGRGLGVAVLVNFASNALVTFAFSPLEDLIGTGALFSGFGVIAVASLAFIFWIVPETKGLTLEEIEASL

SEQ ID NO: 69919 - protein, 124 aa, Zea Mays
MASNLDSSNKKNINRGFGFVRFSSHAVFAKYYCLFLCPRPPRPRLPLPPPPPPTALLAWPPLSPPAATNPAPAIKTYPLHPLLFSSSSPLLPPPVAASPDFPRYCLLLVLDDEMCLIMTMDETF

SEQ ID NO: 69920 - protein, 79 aa, Zea Mays
MPLLCVSAPAQAHSAQRRSRTTHSVATRSAAPRLRAAGLQATACSSSGSRALGEPLLPAGGLRAGRLRLGAGCLVVCLC

SEQ ID NO: 69921 - protein, 707 aa, Zea Mays
MGSGSSKSEFEDFHANAVEEAVKNLAPYLEDTRVRNQAIYFDGWDGLGASAVLNSIAERPPPSLRNKFDDIILHIDCSRWKSRRALQRTIAQKLGLPQHVMAVFDRQDEEDDLVGVHEGSRTEIRDIGREIYRVLQRQSFLVVFHNGSDTMVDFNDFGIPRAAADPWSNIIRKVLWTFRGRLHAIKETEEVSGHLKPDKRQPKGTETVDTSYLCFRSLFSGGPSDVSSYRLQILCEEAAAIAQYTNNPIVTQEIAEICCRYLLSLNSKGNGKLDFNWSAHASNYWVCDGILNECQPEQAWEIAASLHKELRLEGYSSARKFCHPGADTTSWVVTIKSSEDIVPTVKPETTSFFLAVKRKHGHSVLPLPMKMFQRSEQLHVLKLYHCSFSFASPPFLCCLNLRFLGLDSCTDHQSMKPKENKEEESEEAGAEGEEENTATIEFFQSLWVLDICCTDWELTLSPNTIVKMATNIREINIKRGRIWHSSISWRFLGNIHKLRVIEPTSPWETSNKDEFMDMVKLELLDLSGNTTIQFLPSLSGAISLRTLILDGCIELQHVVPETLPPWLETFSFDGGYKQAKISCISLAGCARLVNFRLCGSVQNLEELDLSNTSIKTLDLSDKVVQVPCLERIILLGCERLRAVLWPKDGMPNLMVLGIDTRGGAEAASAKTVHDNFAISKEREEGVAAKVLDNTATRRRRWALCRSR

SEQ ID NO: 69922 - protein, 569 aa, Zea Mays
MEEEAGRSWTTDERGDDDGDQLRGTTTATGSRRVAAAAAGASGEIEMLQTEAAATVVVVGGGASASASVQQGGGDADDECGIQQIPIWKRFLTHAGPGFLVSLAYIDPSNVQTDLQAGSSHKFELLWVLFFGFFFVLVIQSLAAKLGIITGRNLAQMCMYEYPKLVKYGLWLLIEVGVIAATIPGVLGTALAYNILLNIPFLVGVLICGASTFLLLALQIYGVRKIELIGVIFMLLIAISFFVELSTVNPPMGEVIQGLFIPRLRGVYAVSDAIALFSVLVVPHNLFLHSSLVVSRKISPSPKGFKDTSTFFLIENAFAMLLVLLVNVAIVSTTGTICANNTQLVDNNNACSGLTLNSASVLLKNMFGRSTSKIYGLALLASGQSNTMTTSYSGQYIMQGFSGMRKCIVFIIAPCFTVIPSLIICSVAGAPHVRQLINVSAIILAFVLPFSLVPLLKFSSSCAVKVPYKNSACIVQVAWILSIVIMGINIYFFCNSFISWLVHSELPRIVNVIISTLVFPFMAAYIAALIYLAFRKVNAAGIFPSVSASTGTEVEAWRQDGNIDDIGVH

SEQ ID NO: 69923 - protein, 512 aa, Zea Mays
MAATTFFLNLGGGHDDQAFGVGRKGFVMRSRAQSYTRANQRLERDPRSSPAEIPRASVGTADFHGEDDVPDRCPAGKAHRAAAKVTSNIAPDLDVLIVKATSHDDEPAGERHIREILHLTSGSRAHVAAAVAGCSRRLSRTRDYVVALKSLMLVHRLLVDGDPFFHRELLHGTRRGTRLLNLSDFRDEAHSGSWDHSAFVRTYALYLDQRLEFFLQERKQGFLDRFLACRPTGGAKQSRMVLVALYQIVRESFQLYSDICEVLAVLLDRFFDMEYAECVKAFEAYASAAKQIDELSAFYAWCKDTGVARSSEYLEVQRVTDKLLETLEKFMMDRAKRPKSPPREPEPEPVKEEPEPDMNSIKALPAPEDYKEPEPVKVEEEVKPEPPPQPQGDLVDLREHTVSADEQGNRLALALFQGPPAAGGNNGSWEAFPSNGGNEVTSAWQNPAAEPGKADWELAPRRDSKQLVHAEASNVKCHGAKNVSLLQNQKQRDLSKVLCHNEERKSQTMSRC

SEQ ID NO: 69924 - protein, 231 aa, Zea Mays
MNERFPDATSEELDVSDATCIICREEMTTAKKLLCGHLFHVHCLRSWLERQHTCPTCRAPIIPADNGHAVSARQHGAQAGVQPGTATPSSEGAPGENMSRHQAKLEAAAAAASLYGRSFVYPPANTLKSRSVPPQPASSTPQSEASSSNHQSQKDQEMQSRNSSDGLVPLPLNADGAVGSGTSTRDLENSLQKAQENFIKSQIEMLQIQLQMVQRGAAGPPSNENTEHTEE

SEQ ID NO: 69925 - protein, 79 aa, Zea Mays
MEVSFYLYLPNPSSHVLPPLAAITLLCLVPREERKNKGEKRGEMRAYRRPSLSFLSKNWLDFLSSLSFLHLMNAFSCFG

SEQ ID NO: 69926 - protein, 302 aa, Zea Mays
MATSPAASSSSAPTASAVAAATMAVEATDGPVLSVVSKRLRALRKKYNRITQMEESLAAGKTLNREQEEVLRSKPVVAALIDELERLRPPLASALAEELSSRPAPAPSAASSSDSDSSVQDLLALVYFGSLFDVKQQSDFVSLVYTRELERSSCLTYDYVGDDPEDSLAETDLNAVSALASLAALRPPAAAGVSHRDALQACAHHARLWLCRADEPIHPDSTITYAGVRAKLDRIMASGYFTAQLEMRTPLDLAAAVASFGAGGVQVQESMVVSPQAPEAVEESQAVEGHKVCWSLGRGRVE

SEQ ID NO: 69927 - protein, 544 aa, Zea Mays
MPLLCQAQDSSGWNATAALKSRRSVAIAGAGFEDAAEGASDLGDTMSLARKQKVVKETVEMEEEQEFVWKSNLLPYKDDDAFVLPESSKEEYASTSGDTAPSGKMDPRIERSGSNGTSKVPRLGSMLGTASMAGFGKAVEILDTLGCLMTTLSSDGGFVSRTKTKGCKISILAFEVANTILKGASIMQSLSEDTVTYFKQVVLPSEGVQNLVSSEMSELMRIAANDKREELKIFSQEIVRFGNRCKDPQWHNLDRYFVKLESESAPQKQLKETAIAEMQKLMNLVQRTTDLYHELHALDRFEQEYRSRLNGKGNTDRFEKGDNIQIVRLELKTQSSYVKSLKKRSLWSKTLEEVVEKLVEVVHYLHVEIDNAFGPSDGGGVVVNAEPTVSCQRLGPAGLALHYANIIIQIYSIVSRSGYVPANSRDALYQGLPPRIKSALPNELRTTSAPQLTVDQIRARMEKTLKWLAPMAINTTCARGFFLRFSEWAKSGTESVGRRLGQADRVETLYHADKARTEDRILELVVWLHHLVSQSSRPALQKGH

SEQ ID NO: 69928 - protein, 629 aa, Zea Mays
MNTSTYYMPYDRPRYAPPSPQEAMRTSYYASYDRPSYRPPSSQEPPRNSYHVPYDRPSFPPPSPQEQESSPWDSFWNPFSSLDSFGYPRPRSSYDNVTNDDELARLQRVREEEGIPELEEEDDECQEHVQMHRKEEQEDHDNADDDDEDDEEDDDDECEHSDEYMVSDEGTCSVNFDANMKQETKGFESKGIQCTEAPEPRKTVELELKAHKKELMRNRVANAEETPGFTVYLNRRPASLVEAMKDIDCQFSGICDAAREISVMLEASRAQYSASNDLSAKMLNPVALLRSVSSRSSSSRFLLAPSSSIDDLFDNETSSCYSEESCSTMSGSHHSTLDRLYTWEKKLYKEVKAGERLRIEYEKRLTHLRNQDVKGEEPSSVDKTCAALRSLHTRLKVSIQTVQSISTRIEILRDEELHHQLMELIQGLSRMWRAMAERHKAQKRTIEDAKLLFLQHHPSAATAISLGPLEAAGPPPAALELESEIQAWRGALEAWLFAQRAYARALAAWARRCLGISTAARPSSHALPPAFLACMEWGRAVDAATEARVMDGLDFFVAGVGSVCSGAAAGMEGMAGRVLCAGMAAVTGALAEFAAASGDSYDAAVAAVVAAARAPERGKEDGVGQVPER

SEQ ID NO: 69929 - protein, 650 aa, Zea Mays
MGADTLLRSGGEPGSIERRRRGEYLGFLGTRAPAHRHRARGHCSLPFSSVAATAEASTTRDQLAAAPAGADGLHALAEQVVQLVLADGSGASSPRVAFADGVFVDSSLKLKPAFEEVAVGKYRADTQSVDFQKKVDLIPFPPSSRTLVSCYRSSYSYDSGHINQNLSRKCEALVVSGLAEYGDEIDGIAPADIMKIQPILQEDLKLDFSKSRTNKTGNAEITKRRRMVVIDEVLSQDETPFLYSLVFGEGVVNDTTSVVLFNAIQNFDPGNISGAKLLNFISSFLYLFGSSTILGVASGLLSAYTIKKLYFGRHSTYREVSIMMLMAYLSYMLAELLDLSGILTVFFCGVVMSHYTWHNVTESSRVTTKHAFATLSFISETFLFLYVGMDALDIEKWKIVGQTYSPVKSIALSSTILALVLVSRAAFVFPLSFLSNLTKKTPNGKISFRQQVIVWWAGLMRGVVSIALAYNKAAVPHKFVWCRCCLIFGGACRVFDNVSEVLWQCEAFWEGHHHAQLEVVRDHNSERGEAKNEDSRTLQFNYGSFKHKALDKFLTKKVVAVCECGLDYDRLQFCPTDMQKKYFEKQFELAEAVKLPIFLHMCAAGEDFYEIMTQNLHRFPGGVTHSFTDSAEDRDRLLSFEKMFIGKFLR

SEQ ID NO: 69930 - protein, 369 aa, Zea Mays
MVRTLILIQPGTTGRPKGVAISHTSLIIQSLAKIAIVGYGEDDVYLHTAPLCHIGGVSSCMAVLMAGGCHVLAPKFDARSAFAAIQEHGVTCFITVPAIMADLLSYARKEEMAPGCGRTTVTKILNGGGGLPLHLVNAASQSFPRAAIFSAYGMTEACSSLTFMALTTPKLQEPEPEPETQPCGHHGGVCVGKPAPHVEIRIGMDDDGTTAGSSPTGNVLTRGLHTMVGYWANGKADSSECDRNGWLDTGDTGWVDEEGNLWLLGRHKGRIKTGGENVYPEEVESVLSQHPGVARAVVVGVPDSRLGERVVACVSVKDGWNWVDARAEHEHRGGGEEVSPQILHGHCRTKELSNLRCQGLITSGGSHFR

SEQ ID NO: 69931 - protein, 375 aa, Zea Mays
MESSKQSIAITVAHELAHQWFGNLVTMEWWTHLWLNEGFATWMSNLAVNSFFPQWNIWTQFLDDTTAGLKLDSLEESHPIEKALASYIRKFAYSNAKTEDLWAVLEENSGEPIKNMMTTWTKQQGYPVINAKLQGNYLELEQAQFLLDGSSGPRMWIVPITADCGSYYTQKKILLKGKSDRLDIRDIASQCGNQEKGGNFWIKLNINQTGFYRVQYDDKLAAALQNALQAKKLSVMDKIGIVEDSLALSMACKQTLTSLLRLLYAYREEADYSVLSHINTASLSIAKISVDATPGLVGDIKQLLIKLLLPPAVKLGWDLKNGESHLDSLLRPVLLVALVKLGHDKSINEGARRFSIFVHDRNTSLLRPDTRKGVR

SEQ ID NO: 69932 - protein, 59 aa, Zea Mays
MADGWHCSPCPQRQSGLARYMPRWRSTRPPMLSVACGGGVVAGLIGATTAAAANAVHGA

SEQ ID NO: 69933 - protein, 83 aa, Zea Mays
MEDMIPPFFLPRHSFFSWKKLLWQKGSEMWDFSRRKLHAADVVHQIPVYGPSESQGEEASNPATPNERNGPPIVATDDDEGGF

SEQ ID NO: 69934 - protein, 63 aa, Zea Mays
MWFRGGAGEAGENHAVSGGAAGVVGMATTAWRRRWRGGDAVSVLSFCLLSLLWHLCGSTVARR

SEQ ID NO: 69935 - protein, 699 aa, Zea Mays
MEFSKQGQAPVPNNIGSQPLPSSNVQSNQTERPSMFYPSSLPGDWSSQQMFSMGTSVPVSSYCIVPMNQQPVQLGASRPEISRPLGPQPLLSRVSLRPPQQVLNIHTSLPGMAGSQHSPSMAGRRSQQTIGSPKVQMLKSPSFQSSNKRSAQKEPPSKVQHQQLESVRSKFRESLVAALSLDSDQQNKIQSDNVQSAGSIDNFKPGAGDAVQDLVATTSKDVCTTNSGVDTTVAPSRCEENEKLSSDLALEMTTSINDGMQQQSIQVSSEDDLLGQCMVADELLQGHGLSWVSDLDAGISELNAEPNALKRPRTSNVESESKRIKSANELAMEKEKFNQRAEILAFRIEEELFKLFGGVNKKYKEKGRSLLFNLKDKSNPELRERVLSGDIVPERLCSMTAEELASKELSEWRLAKAEEFAQMVVLPTMEVDPRRLVRKTHKGEFQVEVEEPDGFSVEVELGSNVTNIPSKAVEDQTKSNGTAGKVDVQEKDKASDSASHDEDGRTGNNGIPGDVECIDNEKADLMQELILDDVKDTVNLPPIPSLDEFMQGLDSEPPFVDISVGTPQEDVNDSDELDTTMEPSDLPETEDNASAPEKTESKSDKSSAQVNSEHRLESPGHIAVQNSDLTEPRDGELSKSSPSPDKDEAKKTTVDNASNSDSVHHNQAASLPMIRESIWEGAIQLTVSSLCNVVAIFKR

SEQ ID NO: 69936 - protein, 171 aa, Zea Mays
MAGIGGSQRQSARQGNFDDEQRASRAQQRSSTTRSRGKRSPSRGASCAQARAQGTSAGRAQGKTPERRGCAPWEQEARDPREELAGDLLTPFWSAKYSRRTGGGALWSGVDGPWPRAGRSATWRRARVLYLTTGRSAPWGRTARACAGAAEVVVGDLNLALGRDPVGEERS

SEQ ID NO: 69937 - protein, 653 aa, Zea Mays
MSARLRVAELRAELQRRGLDVSGTKPALVRRLDAAICEAEKAVVAAAPTSVANGYDVAVDGKRNGGNNKRKRSGDGGEEGNGDTCTDVTKLEGMSYRELQGLAKARGVAANGGKKDVIQRLLSATADPAAVADGGPQGEKEVIKGGDEEVEVKKEKMVTATKKGAAVLDQHIPDHIKVNYHVLQVGDEIYDATLNQTNVGDNNNKFYIIQVLESDAGGSFMVYNRWGRVGVRGQDKLHGPFPTRDQAIYEFEGKFHNKTNNHWSDRKNFKCYAKKYTWLEMDYGETEKEIEKGSITDQIKETKLETRIAQFISLICNISMMKQRMVEIGYNAEKLPLGKLRKATILKGYHVLKRISDVISKADRRHLEQLTGEFYTVIPHDFGFRKMREFIIDTPQKLKAKLEMVEALGEIEIATKLLEDDSSDQDDPLYARYKQLHCDFTPLEADSDEYSMIKSYLRNTHGKTHSGYTVDIVQIFKVSRHGETERFQKFASTRNRMLLWHGSRLSNWAGILSQGLRIAPPEAPVTGYMFGKGVYFADMFSKSANYCYASEACRSGVLLLCEVALGDMNELLNADYDANNLPKGKLSTKGVGQTAPNMVESKVADDGVVVPLGEPKQEPSKRGGLLYNEYIVYNVDQIRMRYVLHVNFNFKRR

SEQ ID NO: 69938 - protein, 842 aa, Zea Mays
MFRYYEVLPCMAAKHDCLYLHDVGSQEDSFTKDEIISAYTRTRVPQMASSVSQRRTGTVLPPPGDDFSHSAVVSAKHTFKNGTLNTTSQPRLSPPNSSSGRSTLPPAASWGQRDLNARITATGATSSQSHTKPKSESQSNPFSSSSAISSTKTPSSWNDDTSTAAKMPEGQQVSEKESKTLQPYKPGISKETQALSSLESSLDIDFSTIPSAWNDDDIVVSDGMPKGSDENQVPNKNGELTHPASKSLVLSKKDIEMNITSKNPSDFLSSLAISKLDVSTSDGDHSDTNITPKSLTSNAVECQSCHAAGEKMLEDIGSKDIDMEKISSQISSVTLGGNDKIQSMAGNQQPDVMPCTSIDVPMDQNFGRDRSHLNLNELLLPSENKDSSLSCQYSSDKRLAWSLKMQNCSVTPLNDTIDSAMLTDKPYSILLEGSEKPSYPPFVEFPSTWDTSLWNDTKNNAASTIDTITSSQMQTGFSSIDNTYALLNGGQDGLGTVYTHDNVSVYTRGRGNVSGHPGMGSHQHRAMGSVRTDSIGSFDKTISVNKDESRIISDTLSEFNPWDDSYSTANNFVRMLRESENNDVQCTAPSWKSGTGSKQSRFSFARQDNQGNLLDSSLRNCGIGTEQNFSLLPQNSRRNIYQNGLAFQSLENEFSNSNFPGLLDMATTGTSMSKISAPPGFSAPTRVPPPGFSTAFPSQDSLNPTPGFPSGILSHDGSIPLSRFPSFSSGVSAQEVSKLPTRLPSPFSSRFSSQDGPDPPSRFPFSSGFTSQDGSNQLYGSTNPGLFPVPYFPRTSLISHHSFCGALQKIFSGVLFWVSTVIIINLSLEGTQVTWSLMILLY

SEQ ID NO: 69939 - protein, 107 aa, Zea Mays
MRAERNEDLCLRIGVKQGGCSGMSYTMEFENRADASPDDSVVEYDGFAIVCDPKSLLFMFGMELDYSNALIGGGFSFQNPNATKTCGCGKSFATGKESEAAAKACNN

SEQ ID NO: 69940 - protein, 1451 aa, Zea Mays
MDDAGEIHALGSLRRDGSVWSAASDTVFSSLSSRADGGVDDEEALRWAALEKLPTYDRARTAVLAMPEGDLRHVNVQKLDPQERHALLQRLAWVGDDHQRFLSKFKDRVDRVGIDLPKIEVRYQNLNVEAEAYVGSRGLPTILNTYANVLEGIANALHITPSRKQKISILHNVSGIIKPHRMTLLLGPPGAGKTSLLLALAGTLPSSLKVTGNITYNGHTMDEFEARRSAAYVSQHDLHMGELTVRETVNFSARCQGSGHRYDLLVELSRREKDAGIIPDKETDTYMKAAATGDQKADVVTNHILKVLGLDVCADTIVGNNMLRGISGGQKKRVTTAEMLVTPGRAVFMDEISTGLDSSTTFQIVNSIRETIHIVGGTAVIALLQPAPETYDLFDDIILLSDSQVVYSGPREYVLEFFESVGFKCPQRKGVADFLQEVTSKKDQRQYWKHGDDTYRYVPVKEFAEAFQSFHVGEAIRNELAVPFDKSTSHPAALKTSRYGASVKELLKANIDREILLIKRNSFVYIFKAVQLTLMALITMTVFLRTNMHRDSISDGRIYMGALFFGVLMVMFNGLAEVGLTIAKLPVFFKQRDLLFYPAWTYSLPSWIIKTPLSLLNVTIWVFITYYVIGFDPNVERLFRQFLLLLLMNEASSGLFRFIAGLARHQVVASTLGSFGILICMLLGGFLLARENVKKWWIWGYWISPLMYAQNAISVNEFLGSSWNKQVIPGSAEPLGKLVLESRGLFPEAKWYWIGVGALLGYVLLFNILYTICLTFLKPFDSNQPTISEEALKIKHANLTGEVLEASSRGRVASTTTTGTLDESNDEAASNHATVNSSPVNKGMVLPFVPLSITFDDIRYSVDMPEAIRAQGVTETRLELLKGISGSFRPGVLTALMGVSGAGKTTLMDVLAGRKTSGYIVGNITISGYPKKQETFARVSGYCEQNDIHSPNVTVYESLAFSAWLRLPADVDSSTRKMFIDEVMELVELLPLKDALVGLPGVSGLSTEQRKRLTIAVELVANPSIIFMDEPTSGLDARAAAIVMRAIRNTVDTGRTVVCTIHQPSIDIFESFDELFLMKRGGEEIYVGPLGMHSCELVKYFEGIEGVNKIKDGYNPSTWMLEVTSTMQEQITGINFSEVYKNSELHRRNKTLIKELSTPPEGSSDLSFPTEYSQAFLTQCLACLWKQSMSYWRNPPYTGVKYFYTTVIALLFGTMFWGVGRKRDSQQDLFNAIGSMYASVIFMGVQNSGSVQPVVSVERTVFYRERAAHMYSPLPYALGQVVIELPYIFVQSLIYGVLVYAMIGFEWTADKFFWYLFFMYFTLAYYTFYGMMVVGLTPNYNVSSVASTAFYAIWNLFSGFLIPRTRIPVWWRWFYWICPIAWTLNGLVTSQFGDVTETFSDGGVRISDFVEDYFGYHHDLLWVVAVVVVAFPVLFALLFGLSLKIFNFQKR

SEQ ID NO: 69941 - protein, 70 aa, Zea Mays
MATATYYAPRLISCARCSMECTSHLHCRPCSCAPICRVQTRRGVKASERGGTAACSNQQAKTQRIRGTRA

SEQ ID NO: 69942 - protein, 353 aa, Zea Mays
MGIDFMKINLANMGDLRAGTKSWSQEHDFQLRLIFLRFFAQILSGYRNFIDTTSATGFNSQAFLKKRSRATNQPVDSMSMIMQFLETQGFLDYLERCNTAEENAHNLLDKLQDATGRGQNPLTIFPSQVSDPEIITIANPEIEGLDNRHCYKRFPANARTEEQEEKRKSILALASGASKQVPSSPSIRVNGGPKAESLSPRERAAERERMVLDIKVKLQGLWLRLLRLGATEDPLSSFEYGTILALIESDAEGIGGSGFVECIREHIHSGWQCRLTDEQFIAVKELLKMAITLANSRNDLATIRDALEVSAEMYRKDPNNVQDYVQRHLLSLSVWEELRYVILSVKTIISVLN

SEQ ID NO: 69943 - protein, 530 aa, Zea Mays
MGNCCAAPSTEGSGKTRPKKQKENPYNVAYNRGAAAPPPPPARPGLVVLRDPTGRDLGAEYELGGELGRGEFGVTYLCTEPATGARYACKSISKRKLRTPVDVEDVRREVDIMRHMPPHPNIVSLRAAYEDRDAVHLVMELCEGGELFDRIVARGHYTERAAAAVMRTIVEVVQKCHRHGVMHRDLKPENFLYASKDSSPLKAIDFGLSVFFRPGSPYYMAPEVLKRNYGPEVDVWSAGVILYILLCGVPPFWAETEQGVAQAIIRSVVDFKREPWPRVSEPAKDLVRRMLDPNPLTRFTAAQVLVEWAEHPWLHDSKNTPDVSLGDTVRARLQQFAAMNKLKKKALRVIAEHLSAEEVADIKQMFDKMDVNKNGKLTFEEFKAGLRKLGNQMHDSDLQILMDAADVDRNGTLDYEEFVTVSVHVRKIGNDEHIQKAFAYFDRNKSGYIEIEELREALADELDGSDEDIIGGIIRDVDTDKDGKIGYDEFAAMMKAGTDWRKASRQYSRQRFSNLSLKLQKDGSLGADTR

SEQ ID NO: 69944 - protein, 353 aa, Zea Mays
MTKSGALQLARSTGGSLSKDQVKSAVDQYVKYHDLHGGEQESRKSNYADLANKYYDLVTGFYEYGWGDSFHFAGGYPGETSREAIKRHQHFMALQLGLKKGMKVLDVGCGIGGPLIEIARFSSTSITGLTNNDYHVSRGKEHIFSAGLSEQCCSLKGDFMNMPIADNTFDAAYAIQATCYAPEAQGVYSEVYRVLKPGQYFALDEWCLTDRFDPNNAKHLTAKAEIELGDGLPDIRTTRQCVQAMKDAGFEVIFAKDLAQDFPCPWYQTMDPNYFSWANFQCTRPGRIITRAIVNTLEFLRIAPAGSVGAYNVLTSASDGLLKGGREGIFTASFFVLGRKPLKESEIVNGGNL

SEQ ID NO: 69945 - protein, 108 aa, Zea Mays
MIKKSKDLDAIGEMKSHVTWIDKQLKYHPPKNVESEILCEHIKKEREATKARKRPCYLKKPELHERKLMNKYNELKEAGKLDAFMEKRRRKNASKDHRFMSYQRSGDA

SEQ ID NO: 69946 - protein, 629 aa, Zea Mays
MVNKLGPKKWSTIAQALPGRIGKQCRERWHNHLNPGINKDAWTQDEEIRLIHAHQTYGNKWAELTKFLPGRTDNAIKNHWHSSVKKKVDSYRSSGLLAQSQGFTPVEYTAGGLNVDSSSAITNQISEGSGFNVFREAEDSMELSQSSFAKGSCSQEEQNDVTLGSHLHVHESLCPDGSTNDGNGASGLPDIHHRLCTSDMDQDKHLQEGMDLDKHLQHEFSQGTDLHLDVDEVPNNFVIKGSQSSNELAVQFHDTEIMNSSKNDGVSLVPHAITPCVPILPSVSGCVHNINVIYEMGIKNDNCFQSEKCQDISIQSGAYSSEAAGSFLAPLYPLQTSEPAIMMGGPVYYQSSVMSLPPGFISSDGASNASGVKSETSYYPVSRQNLEIKTCHNASGDPEQNSYISSEDDRNKTSEPMGRISESEKKQQVDVEQSCLEPAACIGKEALSSHGDTILSKKEDAGALCYEPPCFRSFEFPFVSCELVNSSDLPEYSPLGIRELMRTSLNFPTPVRLWGSPTRDGSPDAVLKNAAKRFMCTPSIMKKRHRDLLSPVSDIRTDKKPNTERDFMSSGISSTRVGKSCMDSADDSADLVSPKESAFQKKLKLCHENKENLNEIADQGENEANAKIG

SEQ ID NO: 69947 - protein, 523 aa, Zea Mays
MAKTSEVIAGIALGIPLMNGVLVPIITILVNRFFSILLTDTSRKLSNLENLTIPSLKETLVQVEEQRMVRAPKDAQSESDLRTLDGLTTELKAALYEAEEILDLVDYYRIKKRIADDAEENGRSRWVQQTLRAFRTSMARCQGSSWVRHLHDCVGLCVACCKGTLFRRSGEQLPISHASSVSMAQRLRGWYRHLVHHIPSSSRSVMQWLRHWFQHLVFNFAKLCESGTQTLPGLPAADVIATNQDWSYKVIGINSNQNDGTATASFLLTIARHNLTKRIEHIENVLNDLKKSHLLNQQSTISSSSNKEKSSRHEDIQYLYRSIERKVIGRDKEREKLISMLRRGPGPDTPSSSSSKHYSVIGIYGIAGSGKSTLAQYVCDYEKAEGQHFDPVMFIHVSQTFRVDKIFRDMLREIRKDRQSDSNSVKCLHDELKEKLRGKCFLLVLDDLWVSRENQEERAILLTVLDAGQSGSRVLVTAQKKDVAAALGAEEQIPIPDMEEEQYFSMFMHYALEAAYSLASSCR

SEQ ID NO: 69948 - protein, 156 aa, Zea Mays
MVAGCLTPAPCRRTPIPPWPRAPSAVCFAARQAPSRGLLPAESQPNSSVQRPVEASRSCAPSPCCSPCVRGPLSLRVAGFSVRRGACALGSVQFMSRSAVRATRHPWPLSVVESLRAHQLPVSRSIHLNRSSPAVHTCRCAAALVRISPKSLPWLS

SEQ ID NO: 69949 - protein, 101 aa, Zea Mays
MLCPHCPCSFPCCKLSGNLQLGLHHRLFACSAAPDRRVTVKLHALPCVAFRCCCSRVVIAQVLSALNLPPFCSPAVDSLLVSLCCHSSLSSSSPSTLPVRS

SEQ ID NO: 69950 - protein, 205 aa, Zea Mays
MPPLLLPADGFRREREREREREREREREAHATNGAPPPIRRAQRLGLLVKRLPADDAVAFRVKRDPSAARDPANFHRRDTWANEVMPRGETRAARASTPEQPSDGPPARIWPLPPRYALSHGHERIKASESLGSVRFSEWGRMQPGSPSVLRSAAPGGDAFGARGGRHPAAGFGTRTGVCSRPKRKFVRTTDRCPSASAVVPVVV

SEQ ID NO: 69951 - protein, 282 aa, Zea Mays
MATASEIAAVGVIGAGQMGSGIAQLAAAGGCAVLLLDADPTALSRAVISISASLRRLAAKGQLSQDLRDADLVIEAVVENEAVKKKLFVELDKVTKPSAILASNTSSISITRLASATKRPSQVIGMHFFNPPPVMKLIEIIRGADTSDEVFAAVRSFSERLGKSVICSQDYPGFIVNRILMPMINEAFWALYTGVATKEDIDAGMKLGTNHPMGPLQLADFIGLDVCLSVLRVLHSGLGDSKYSPCPLLVQYVDAGRLGKKRGVGVYSYGHRPSSVRPKSSL

SEQ ID NO: 69952 - protein, 1478 aa, Zea Mays
MEDKAVVRKRLVSSNNTHAKVESGTCNVCYAPCSSCLHPHIRVVDSNVECASSQTCSTRSEVKNNSLVRNEKGLCSKGENDDEFSATSGHVSDSVVARASIADDSSEVNMPSKRRRLLNENTRLPRAEYLEDSNSCVTGISAEGKLHVDKKKLSTSASSRDLTAKDYKVNSMANHSKLRNQCIDESKKGSDGRDMHPSSSGRFSPVDSSVMTKKMLRTQSSVSALSRLSPNRQAHEFGKALDNLSHQPCEKASLLKNNEQLRCGQLNPCIAGENNHGTLAGYSNRHADKDVFSLKDLDNGTLCSKDEIQEHGGIHSNDDVKKNVCGEQALDQDCSRDISSDRKLNIQHDVTDCGNSEGLIDVNVCDICGDVGREYLLATCTRCLEGAEHIYCMRVKLEKVPVGEWFCEECQLKEDQNNTSNYGISVVNVTEGKNQRTESRSKPKTLQIVVPDFDALEVTHSALTADRCDGNSKRLHLASTDTQTRQLKDTTPAAQRLDVKNKKSLSVTNRNKLQVLTSDLDTRPHNYGTSTSGVYTNKSQSSEFLLNHKKLRVSTDMQSPLSSEGLRSPPISCKRHAESMSSPKPRIVKAGTLGKQDVISRANSFKKSNKGGLSSVDNIPVRTTQAVKSSDSQTLSRSYSLGNMVNAKAPVPSPRGFLSKQLSFNSTNNGPKVKQLADGVSSKLRPAEHSPRDPRDKKSIKKIVQSGSFKHEGSDSIVAGSSKKKQTFHLSQDEKPGVLKVIKENNLTERRASFSLKKRNIPSSPRPDSCMKSGERKNDQDISRSGTSILKSSKKPGYAEKKQNNDLSRSDNGKEDVTVHPKTMEVSGKDAYVVKTSDPPVQPQCAKKDRPNDVEDDDLLISVNNVNIAPNEHAEVVPTTFAAMTYESDLQDVPRESTSDDSAPKVVCCQQKLLENTGDDSGKIVEVVQDSGDILSVTPHGLQMAHNLYPPDNKLHKPDLKKEAFADQSSALGNCLKDFVIPEQSYIWQGGFEVSGHGNSPEMFDGFQAYLSTCASSKVREVGEQLPDKIQLAEVPRHSSWPLQFNEVNPTEDNIALFFFAKDVESYERAYGKLLDNMLLGDLSLKANIGGTELLIFPSDKLPERIQRWNGLPFFWGIFYARKASSPLELPTNNCPLEQINEPVIQHDIGSPKAHQPLGIDLNECPNDYISDLSLSLGSESEKSGASLDRNIVLESKREDRSLNASEIHHEETAGTRQIIPGHPSVASCGTNLPTISTGGHDMIQDYLAAAKGSTGTPGGNKMEKTDQNETLFRFSQQLGATRSISHEIELNKHGLLPSHCHLSGSKICDDQTKSTPNSDMGPLDFDITNKRQKTYGKHSCIFGDAMTPMKCLSKIHPLPAGQDNPCDVLQHCHRGPSDPASLKKPLPDHFIHVLSSDDEDSPEPSTSLNKASSKADEGSSILCSLSLSMVATKRNLSGSDIVDDEPLSLSLGLPSVVGGRADQEMKQFLPEKPGINT

SEQ ID NO: 69953 - protein, 1303 aa, Zea Mays
MSLTAAPVAFIGLDELSVELAASFLRSGACVRSFTPEAERSPSAALAELNGLLQCASPVEAARDAALVVVLSDAGGVDELFFGVEGIAKGLCAGSIVLIHSTLLPSQLEKLEQELTDQKKDVFLLDGYIFTGLSDELKQQIIIVASGRQDIAEKASKFFHGLYKTIYFAEGEFCTSRKIRMVNDLLEGIHFVASIEAMYLGVRAGIHPTIIYDIISNAAGSSRIFVELVPKLLSEDPLLIDFLKSTRKKASHVMDMSKSVTFPLPLLGVAYQQLVHGSSAVTGDGSASPLKVWEASFGVNIVDAAGEQIYDASKLADQLVAESKAAKRIGFIGLGAMGFGMASHLLKSGFCVVAYDVYKPTMARFADLGGSTKGSPEEIAKDVEILIIMVANESQADSVLFGNAGAVPVLSAGTSVILSSTVSPGFVIHLNRRLEAECRQIKLVDAPVSGGVKRAADGTLTIMTSGTDEALHCTGSVLSALSEKLYVIKGGCGAASSVKMVNQLLAGVHIASAAEAMSFAARLNLRTRRVFEIMQHARGYSWMFGNRVPHMLDNDYTPYSAVDIFVKDLGIVSCESSNSRIPVHVSSIAHQLFISGSASGWGRYDDAAVVKVYETLTGVKVEGKAPMLSKEDVLQSLPSEWPEDPIDNLVPIASHSSKKFLVVLDDDPTGTQTVHDIEVLTEWPVEALVEQFLKLPTCFFILTNSRSMTADKAMLLVQTICKNLKAAAEKVPGVSYTIVLRGDSTLRGHFPEEADAAVSVLGEMDAWIICPFFLQGGRYTINDIHYVADSDRLIPAGETEFAKDAVFGYKSSNLRQWVEEKTKGRVLENQVSTISITLLRKQGPTAVCEHLCSLEKGSVCIVNAASDRDMAVFASGMIQAELKGKRFLCRTAASFVSARIGIKPKPPICPNDLGLKRALTGGLIIVGSYVPKTTKQVDELRSQFGQSLRVIEVSVEMVSMKSMEDRDQEIRRIVELGNAYIQSRKDTLILTSRQLITGKTPEESLEINYKVSSALVEIVRRIDSKPHYIIAKGGITSSDIATKALEAKRAKVMGQALAGVPLWQLGPESRFPGVPYIVFPGNVGDNSALAKVVKSWASPSRSSTKEILLNAEKGGYAVGAFNVYNLEGIEAVVAAAEAEKSPAILQIHPSALKQGGVPLVACCIAAAEQSSGFDSVMVDGSHLTLGDNILYTKSISSLAHAKGLLVEAELGRLSGSEDGMTVEEYEARFTDVAQAEEFIDETSIDALAVCIGNVHGKYPPSGPNLKFDLLKDLRALTLKKGVSLVLHGASGLSHELVKPANKP

SEQ ID NO: 69954 - protein, 72 aa, Zea Mays
MQMRLAEGYGLFPSRPIRSRRPRLNRVFKRTGMLCGSSYPISTAQNNPSPSYPVFNLTRGSINQRPKGCLMQ

SEQ ID NO: 69955 - protein, 1172 aa, Zea Mays
MITCMVGLNAAEVTRREPEAELCPLWIKKFNRELMRTLSFSEHETFDHPVACLLVVSSMDKEPVNKFVDLFNTNQLPSLLNEGIMDPQILKHYLVLHDQQEGPQDIAVNVLAEMRSTLGLNDCKLLCINSSTEAGGSNADNSWLPYKALVLNNHDGSCILSVDDLNEIKDFMQDFVSNHIIPYMEQKIRVLNQQVATTRKGFRNQIKNLWWRKRDDVPEAPNGPMYTFTSIESQIRVLGDFAFMLRDYELALSNYRLLATDYKLDKAWKRFAGVQEMSGLCYFILDQSRKDAEYCMENAFSTYLRIGSSGQRNATRCGLWWAEMLKTRGQYREASNVYFRVSNEEPSLHSAVLLEQAACCYLLCNPPMLRKYGFHLILAGNSYFVSDQKQHAVRVYRNALFVYKQNPWSYINNHVHFNIGRWYGVLGILDVAIKHLLEVIACSHQSLTTQNMFLNDFFHYVQSMGKKFDVYKLQLPVFNMSSLKVLHEDHRTYASHADVGVSESTWQELEEELIPSSSIVKTNWLDTQPMRKYKDSCICVAGEAVKLSVELKNPLQIPVAVSGISIICQLSSTLDALSSDVSGLDLDGGEDKVNTEPSISMLETDGDKFTLSKLDIVLGGGESKRVQLDVTPKVEGILKLVGIRWTLSESVVGYQYFEFNAQKKIKKGKRGPHRSWNNSLVVIKGLPKLTGSIDRMPTKAFAGDLKLLTLNLRNHSEYAVKGIKMKLSNPRFLIPGDSSDIGLKFPHCLKRHVQSESSVVSAKTMKDNFKSLLFAFPQDIEIQAGAALSWPIWFHAATPGNVSLYISLYYEMGSSSDIKYRTLRMHFNLEVLPSLDVSFSVSTSSSRLQEYIVRMDVMNKTPSESFVLHQLSCVGDKWAVSALAACSSINSVETVSENQAVSYFFKIKDCEADSCKEAESDSCTSDMALCPGSSTDLFDIARSPFVDFHHQERCRQVKMAKGPCSLLDFVLISKAVDNSSKPTPDFELLSHHTCHCSALSQNPIWWLMEGPRTISHDFSKSYCEANLQLVIHNSEAHKILVRVVTFDVIPEKTVHPHDSTSAQGGWYDVSLESDVKAISSSKSTHQEKRSSKSIPPYVWCSLSCAQIELQPDSCARVPLKVCIFAPGTYNFSNYELQWKVHLSEGPHVGENENRLSGGGLGYPFYVTVLQGV

SEQ ID NO: 69956 - protein, 946 aa, Zea Mays
MRWQRSKFSWLLSACLICLLLQLVGAIRTSLFWPQSCLPSPAIPREDESVEQLWHSCALDLRIPQDVRNKFHYSLLFNTISNSYRENDNKSYPQKVGIEEATTATFSPAEVANTFLDCLNKHNFPFSDHGLQKHQEETISLLPNSNSINLPFAMKRRRLLEEDSAIAPPRPKAKQAIRSVLSSEGEAHLLVTTVKKSGKPEPKNKSKDNSGTIIAGLSVACVALVALICLCCCACRGSEDPESSYDDKPLLSLNMSDLSGSSRKSCSTPIDVNRLGALSTSSSASQRKEFKFPPIKAEVREMSMKSEFERRSNVQAMKLSSHEITTIAGRPATSTNSQDVKSAVAAVPSSNASDSICKPAAGPAPAPPPPPRPGYPLPKAPPAPSAPTPPVPPPKMPTAAGSSNPPPPGPPPPPAPRPAVGPGPPPSPSSAGPGPPPPPGRGGAGPPPPAMPGGPKARGPPPLKKAGNVAGPPVADNKTKLKPFFWDKVTANPDQAMVWDQIKAGSFQFNEEMIESLFGCHAADKKNADGKKDLAAKDTPQFVRILDAKKAQNLAISLKALSVSADEVRNAVMEGHELPIDLIQTLIRWTPSSDEELRLRLYTGELTQLGPAEQFLRTIIDIPYLYQRLDVLLFMSTLPEEAANAEQSFKTLEVACHELRNSRLFKKLLEAVLKTGNRMNDGTFRGGAQAFKLDTLLKLSDVKGVDGKTTLLHFVVQEIIRSEGVRAVRAAKEQNNSSISSVTSDDLTEDVSDDTEHYKQLGLGVVSSLGDDLQNVRKAAILDADTLTISVASLGHKLVKANEFLNTGMKSLDEDSGFHRKLGEFIEQSQVRVTQLLEEEKKLRALVRTTVDYFHGSTGKDEGLRLFVVVRDFLGILDKVCREVKEAAAKAAANNKKPSAAGSGSKGRQPSQSSSSFRDPRQQLVPAIKDRRSAAARSSSSSSDSD

SEQ ID NO: 69957 - protein, 56 aa, Zea Mays
MDPDPRPPAAAAAAQVRLLLMAIAAVACINAAEPHLALAAFVLWLVAIFPPLHRHD

SEQ ID NO: 69958 - protein, 966 aa, Zea Mays
MAAMQQLLLLFLLLVYLRPSFGQTNPQDVAALQALMNNWQNEPPSWTGSTDPCTSWVGISCSNGRVTEMRLTGMNLQGTLSNTIGQLSALKYLDLSNNQNLGGPLTPNIGNLKQLTVLILLGCTFTGNIPKEIGNLSQLTFLALNSNKFTGGIPPTLGLLSNLFWLDMSANQLSGQIPVSPGLDQLVNTRHFHFSENQLTGPMSESLFSDKMNLIHVIFNNNNFTGPIPASLGQVKSLQIIRLDHNIVTIVASRLDHNQFSGPVPNSITTLSNLMEVSIANNLLNGTVPDLTNLTQLDYVDLSNNNFASSPAPGWFSTLRSLNTIFMDHGELNGTIPSAMFSLPNLQQVSLARNSFSGKLNMTGNISSQLQVVNLTSNQIIEANVTGYSNTLILTENPVCLDNTSLCKLKQKQQASYATNLGPCAAIPCPFDQSASPVTSQNCACTSPIQGLMIFQAPAFSDVISPTMFQIVESTLMQNLSLAPRSVAISNVQFSQGNPLTFIVSIFPASGTSFNRSEVIRIISPLVNQTYKAPPNFGPYSFIANTYFTVPSNKKPSMGKAAIIGISIGGVVLILGLVAVATYALRQKRIAKEAVERTTNPFASWGAGGTDNGDAPQLKGARYFPFEELKKCTNNFSETQEIGSGGYGKVYKGRLANGQIAAIKRAQQGSMQGAAEFKNEIELLSRVHHKNLVSLVGFCYEQGEQMLVYEYIPYGTLRENLMGKRGVNLDWKNRLRIAIGSAKGLAYLHELADPPIIHRDIKSTNILLDESLNAKVADFGLSKLVSDTQKGHVSTQVKGTLGYLDPEYYMTQQLSEKSDVYSFGVVLLELVTASQPIEKGRYIVREIRTAIDQYDQEYYGLKGLIDPKIRDSAKLIGFRRFIQLAMECVEESAVDRPTMNDVVKELEIIIQNEGAQLLNSASLSVEQFGNEKRRDPYAEHLPMNDESSSSTFDYNSGYSYSAVQPK

SEQ ID NO: 69959 - protein, 166 aa, Zea Mays
MVPVLKRYPARLSVLSLTCIFGLLQFLAIAAFTEEDLSRWKVRSGGELFTILYAGLVASGVAFALQIWCIDRGGPLFTAVFQPVQTVAVAVMASAILGDQLYTGGIIGAVLIVIGLYFVLWGKSAEKKGARNLLQDQLAQGADVTRHLLGGEASAKDEEAAPAMLA

SEQ ID NO: 69960 - protein, 319 aa, Zea Mays
MFPSPHRSENHSQARPTSCPCTTHGPRPNGPDSVRRLRAGHPEAPVRQRRVRRWQQQRQRHRREAQGAAAGGGPGGGAGRGAARVRRARRREHVHRGVGDVHGDGAGHDAAAVRGRAGPRPRRHVHLQPALQPDGAGAGAADGGAGGHGGGLLHGVRDVRHLVRADAAGGRRRARGGVAVPVRRDTRAAGPVPAARLRGARHLRGRRRRGRRARRGGPRRDAGGVRGDHVQPDARRRRHPHAGAGGARGRRQARGGQHLHPRGGVARAPRRRRRRPQRLQVHQRRRRHHRRLDAKATTMTTIKAPSDKVQSHAGAVGLA

SEQ ID NO: 69961 - protein, 441 aa, Zea Mays
MAASGEGASLPSPAGGEDAHRRRVSYFYEPSIGDYYYGQGHPMKPHRIRMAHSLVVHYGLHRLLELSRPYPASEADIRRFHSDDYVAFLASATGNPGVLDPRAIKRFNVGEDCPVFDGLFPFCQASAGGSIGAAVKLNRGDADITVNWAGGLHHAKKSEASGFCYVNDIVLAILELLKFHRRVLYVDIDVHHGDGVEEAFFTTNRVMTVSFHKYGDFFPGTGHITDVGAAEGKHYALNVPLSDGIDDTTFRGLFQCIIKKVMEVYQPDVVVLQCGADSLAGDRLGCFNLSVKGHADCLRFLRSYNVPMMVLGGGGYTIRNVARCWCYETAVAVGVEPDNKLPYNDYYEYFGPDYTLHIQPKSVENLNTTKDLENIKNMILENLSKIEHVPSTQFHDRPSDPEAPEEKEEDMDKRPPQRSRLWSGGAYDSDTEDPDSLKSEG

SEQ ID NO: 69962 - protein, 437 aa, Zea Mays
MAAACLRRLHRIPHPVLKLAAATHWPLPFPGAKLAPVTQSCPSADRVEVQLSARCPGFASNGNFKHRWHHKLGSSVGAVLIGHAAFFLGLSNGSAFAQEDSVSPAAASEHAEGNAPGLQPIEDGSVVSNEHTVKWRIYTDNAREFFQKRQLDEAEKLFQAALLEAKEGFGLRDPHVASALNNLAEFYRLKKEHVKAEPLYLEAIEILEESFGPDDIRVGRTVHSLGICYHLQLKLAQAQTCYERALKIEGRVLGVGHPEYSSTMYSLAKELIKSRRFAEAEIWQRKILHVLELSEGWDSLVTARAAELLSLNLETMEKLKESEELLERCLAVKKKILPEDHLQVAYTLVHLARLTLHRVVKDRDVNSDVTAYYLAKAKQFSNDSIRITEGQLNSSRKDQNKINNTSTADTDKSAAIILHAEVVTTPLLPWCRFLLLV

SEQ ID NO: 69963 - protein, 463 aa, Zea Mays
MRKRIGDVIDEDVVHSRAPFVACTQQCFAVKAGIDGLLDVARRSFCDTSEAIHNLAKKYRDDYNMPNLKITYNIRQGFYFIIPQKDITDRLPNKFIQVVRHGKNLHCSSLELASLNVRNKSSAAECFSRTELCLEGLIDKIRGDIAILTLLAEVLCLLDMIVNSFAHTISTKPVDRYTRPEFTDDGPMAINAGRHPILETLHTNFVPNNIFLSEASNMVLVMGPNMSGKSTYLQQICLIVILAQIGCYVPAQFASLRVLDRIFTRIGNGDNVENNSSTFMTEMKETAFIMQNVSSRSLVVVDELGRATSSSDGLAIAWSCCEYLLSVKAYTVFATHMERLSELSTMYPNVKILHFEVDLRNDRLDFKFCLKDGIRRVPHYGLLLARVAGIPTSVIDTSTSITSQITEQEMTRMNANCEEYWSLQMTYQVVQRLICLKYSNHGDDYIREALQNLKESYSAGRLT

SEQ ID NO: 69964 - protein, 178 aa, Zea Mays
MASIKRPYQTASTSLSQQQRLRLCSLLFFLNPRRNRRALDQRRPAHLARGLTLGSGTTVQPRMTCRSIVDQRATPLMSDLDIYRRQTIIIYRQVVLGYTVAPAPDVRLCRLRRHVLFFPLSSSDDDDRAEGNLRKVNHIKSSDRIKLLQIMRVCGTAAASQCQGRHACTNPSSPTSCS

SEQ ID NO: 69965 - protein, 123 aa, Zea Mays
MSLVELKSKYRKVSSVDKISKGWQEEYDSSSKQCMHGPKCKLGSNCTVGRRLQEINILGGLILPVWGAVAKALAKQARQIHRRIRVVRLETTTENKRFVGLIIPNSAVESVLEGLQWVQDIDE

SEQ ID NO: 69966 - protein, 384 aa, Zea Mays
MASSSHSLIHPSSFDMFCPRSSHDASSRLPSPTQVPELAVALRPASHSSVQPPSSTAYIFACPAGATAPLIHPCTSATPQLPPLLPSLAVPLPATSDPFPAPDPDARTSGLLYYAILAAAPMDPWIGQPSLSLDLNVGLPTAARPPATTTTAEVLVEEDFLAVKKDREVQVQALEAELRRAGEENRRLSDMLRAVVAKYAELQGQVNGMAAPVVSTAGNSAAAAAANRQSSASSDDGGSCGARAAAAPSSSPGPPTRRPSPSRRTTSRSCSTTSPSRPTRPRSSATSTSSTTPSGAGPAPAPATTAPARCSCTRATRATSSGSPPTPGSCSTSRPRSAPSSSSSSTGSTGSRSRSGTTRTGRPRRWATSRPRRRWPTSPSSSGA

SEQ ID NO: 69967 - protein, 1310 aa, Zea Mays
MADLLLQAREQLIEGDAMDGLAQSVNTAGLFSTGSGRPLAVSQRAVRRASALVGEEVDEATDNNNKKRSGVHKDNFFPMFQSGSGKAVLLNKDSIQKARAVLEENVENAAGAKQPMFHTSTGRSVLVSKSSIDKARAVLGGRMIAHEGNVEGPGRPANQSLIFQTSSGRPVLISKRYVERSRALLMDEDVKNILFTSLCEGQWDTGCQLPIFQTGLGRPVAVKHSSIKKASTILGDGDVKRSGNGHTGVCTTPFQFETPKSVLMSSSLIINGMTVTPEENTSVRAEKCFNDDGQLPLFQTGSGRSVTASKGSFKRASSVLEPRNIAKELEDESHLNDGYATSIFKTGLGKSILPTENSRERAQFVLEAKEAVKQAATLLGLEENTLSTQFFGHVSDKLGTEITVKRGNPEHMLDVASAHAISSGTHKGFIYPTENPTHMDKHQQFGFSKSSTSYVGEHSIRFSTAGGRSMAISVDALQRAKSLLGDSDLVVSPNGSIGRSLASAIENLPKPTISPKGDVSNLSYGTRAIGYAVPDTPVTKTSANQFHMGREYRPVNEIPKVPKPPSRCLSEGDNASNSKDKTQWHHMPAGSGNTDCLANGKRIIGGRNSVSPFKRPRSSRFITPIKNNKLSSAGESIVPPMQISPCRTMLSVRYPFQHQRKNYKEYFGGPPCFKYLTEHVTDDVKLMDARRAEKFRFQHMDTGAEEFQKMLLTCGASLSCATKEWVSNHYKWIVWKLASLERCYPTRVAGKFLTVDNVLEELKYRYDREVNHGHRSAIKKILEGNSSPSLMMVLCISAIYSCPYQNNNKLEVNKVDTNEDNSGNQSFSATNRNMSANIELTDGWYSLDASLDVALLEQLEKRKLFVGQKLRIWGASLCGWSGPVSFHEVSGVVKLVVHINGTYRARWNDALGFCKHVGLPLAFRCIKVSGGRVPRTLVGITRIYPILYRERLPDGRFVVRSERMERKALELYHQRVSKITEDILFEQQENCDSTDDNEEGATICKMLEHAAEPEFILAGMTPEQLKCFSSYIEKQKIVKQNEVSEKVEKALVVAGLSSRDVTPFLKVRVIGLVNKHSASTSSNKEGLITIWNPTEMQKDNLVEGQAYSVMGLVPSNYCTEIMYLHARGSSTTWKPLASAQTTDFKPFFTPRRAIELLKFGEVPISSEFDIAGLILYVGNTYLCNNKKKQWLFLTDGSKFVSGQGCEEQDCLLAVSFSSATTDEDSTLFSYTLSGNTVGFSNLVKRQKDETRQVWVAEATESSSYTLSNEIPRKSHLKEAAVLAERWASRSYHKIQELKERVLCIVGNAGV

SEQ ID NO: 69968 - protein, 72 aa, Zea Mays
MGCAGSTPKVDEIWDALRVAAESDLALAQTIVDSAGIIVSNPDMTLCYDERGAKYELPKYVLSEPANLIRDG

SEQ ID NO: 69969 - protein, 98 aa, Zea Mays
MRIGGPRPAACALWDGRQSWHQGYVHCPPSNVDITLHVYTFKFKREHELRPAQVNAAEAAAQLKLGEQMGMKREQERKKGCTTGTVHFLKGLENLCQK

SEQ ID NO: 69970 - protein, 129 aa, Zea Mays
MIELPLYCLHQSRQNWLALPPASSQTSPPGFGFPAWCLQSPSSSTRPPASTSADLPAPTSRPSPLSPCSPERPASTPSADESPCFPLQSSPTTAPMDPPSSPAPSHSPSPGISSNIRGGAPESAPNTKC

SEQ ID NO: 69971 - protein, 1745 aa, Zea Mays
MPHSHSNELRELYARKAASLRSSPSTSRFLFFPVPRSPPRFPPPHHHFPRRHSRSRPQGLHRGISLQPPLMHLSFHPPAPSHLPRRGGVAPTTTPSFVLRRNQRRRRHHHRPYRLAPRASLSDLIANLPSSLALVGPAALAAAAAVATSFSSWSSSSQTSLPPPPQESEDYNACGDVAGEWVLFTSPAPFNRCVLLRCPSVSFEDGLDGVNERLLTEERHYVNLSRGCIPVVRGGDGAYDISYQRICIALEDGGVIALDWPDNLYLDKEHGLDSTVLMVPGTHEGSMERNIKVFVLDALNNGYFPIVMNPRGCGGSPVTTPRLFTAADSDDICTVVQFINSKRPWTTLMGVGWGYGANMLTKYLVEVGESTPLTAAVCIDNPFDIEEATRSFPHHITLDEKLTAGLVDILRSNKELFQGKAKGFNVQKALSASCLRDFDVAISMVSHGFDTLHDFYAEISTRLSVAHVRIPLLFIQSDDGTVPLLAVPRSSISENPFTSLLFCSCVHSTMSMFQRYSVLWCQNLALEWLSAVEFALLKGRHPLIKDVDITINPSKGLAFVEPQVNQRKSPKGNSFRQHSELILYNNVAHGINGLLVDSANKYSGAQNKENGQLNNNGDIGTVDKDLEEELEESSEDVEKGQALQSASLVMNMLDATMPGTLNDDQKKKVLVAVEQGETLVKALEEAVPEDVRGKLTASVTEILHSKRETFSLGALNRLGWNNVRPTTTKTLAQEKLKDSDHESGLKDTKMVDQNRISATAFEGDLKDINMTNDDKPGESIESSQGKPSQTSEPVGTATEIGTEQPYKSDKANYGTNDSSEGQHITEQDNEMTPKQVSDDQSVANCNGPSKEREQSADATTDQNLQSNTTTEKEGDTSRTGEDKTAHNVNDQSTQVSKTEESKPSPITVTQALDALTGFDDSTQMAVNSVFGVLENMIDQFEKQQDSENGESADGNDGITSVDETESHVKENTENVSSGEDINHSSKQPEGSSPGKTDSIMSKYDCAFGEENPNLSIVSYGRGKMRYYRGNKVGDHVGADGIERVSGLPDYLLDIAVNSYLKAQYAMYLREFLYTELQLKSPESNSATDLFLDPQEGKWKIEEQMGNVQNDNFESSQESSKMDNAIEPPYFIPGKNPDIAYKSNKWNNTVATRSKPGNDLNEALTHFVRDELSSALKIEVGRKIGITDTKQLERSLANDVEQIAAEVSKTVVLDCELYSAIHVQRSPTTIKFGSTHGKNVVEAVSTAVQQSQHLRNILPVGVIVGVTLACLRNYFHVGVSKHGDHMIATMKSDIFGEEVIVQDSSKENVQDSGKANTNDNNIEKTSGENQQDMTKSQGQDMMVGAVTAALGASALVAHQQNKDENCKDFVEIEGAKHEETAQEKSQNSLMSSFAEKAMSVAGPVVPTKGDGEVDHERLVAVLAELGQKGGFLRFIGKIALLWGGIRGAMSLTDRLISFLRISERPLFQRIMGFSLMVLILWSPVVIPLLPTLVQSWTISASTGIIGYACIVGLYISIMILVMLWGKRIRGYEDPVEQYGMNIWSASRLREFFQGLVGGVTVVGLVHSISILLGFAAFRTGFSSSLARPLDLLKSSSNVFLLALRGLATATSIAVVEEMVFRSWLPEEIAVDLGYYNAILISGLVFSLIHRSLPSVPGFLLLSLVLFGLRQRTQGKLAAPIGLRSGIMTASYLIQSSGVLTSKPETPFWMISTYHLHPFDGVIGLSICSLLAIFFFPQKPVQKDTSV

SEQ ID NO: 69972 - protein, 1497 aa, Zea Mays
MDASTAGDGDTNTLKRPCKTSPPEGETDKYKRQKRECQDFSPRRYQLDVYEVATRHNTIAMLDTGAGKTMIAVMLIKHFGKINKANNDRKLIIFLAPTVQLVTQQCEVIKSYTDFEVEHYHGAKGVDQWKAHSWQQQLLKYQVMVMTPQVLLDALRQAFLILDMVSLMIFDECHHATGNHPYTRIMKEFYHGSEHKPNVFGMTASPIIRKGVSSDLDCKNQLSELENILDSKIHSVVDREEIELCVPSAKEVNRYYEPRTVSFDDLSEELEILCSKYDGLIIQLHNRSTNQYKDADEITKESRKRLSNSLAKICYCLEDAGLLCASEATKICIERGQRKGWLKGGSDTTDQQSGQNGPILFAEISMLHMEFFQEVLDIIGKRVQQQQGIDALLNSERGCVEAKNMGYISPKLYELMQVFLSFSDPDNVRCLVFVDRKISARVIERTMKKIGQLSCFRVSFLTGGSSSVDALTPKMQKDTLDSFRSGKVNLLFTTDVAEEGIHIPDCSCVIRFDLPRTTRSYVQSRGRARQRDSQYILMIEQGNVKQDDLISGIMRSKASMTGIASNREPEDSHPSFLPTEEINEYHISKTGAKITTDSSISVLNQYCDKLPKDKYYTPRPKFQFTHYGDGYECTVTLPSSAMFQLLVGQKARNMQKAKQLVCLDACKRLHQLGALDDHLSPSVEEPPPEISSKSSISTPGAGLGTTKRKELHGTTKVLSMSGSWGSDRSVTKLQGYKLNFVCDQVGQKYSAFVLLIDASIAKEAATLDIDLYLHDKMVKASVSPCGPLELDAWQMEQTKLFQALLFNSLFGKLFIGSKASKTPREFILKKDDVFLWNKENMYLLLPVDSTLDSHKSVCINWSVIDVVATAVGFMRSIYSDGKCNLTDKLNYEKNGEDLIHLANKSCKGNDLKNMVVLAIHTGKIYTIVVVSDLCANSKFDGTTDKKEAKFRTFAEYFEKKYSIFLCHPLQPLLVLKPTHNPHNLLSSKNRDEDNVVENKNRANSLVHMPPELLIPLDLPIDVLRVFYLFPSLMHRLESLMLASQLRSEIAYRDSDISSFVILEAMTTLRCCEDFSMERLELLGDSVLKYAVSAHLFMTFLNKHEGQLSSRRQETICNATLYRLGIERRIQGYIRDAAFDPRRWLAPGQLSRRPCPCECPVNSEVVTEDIHRIDDKSIIIGKACDKGHRWICSKTISDCVEALIGAYYVEGGLKAAFAVLKWFQIETEIEEELIMEALSSASVRNYLPKVDVVELLEAKLGYTFQMKGLLIEALTHSSQQESGATYCYQRLEFLGDAVLDILITRHLFLSHKDTDEGELTDLRSASVNNENFAQVAVKHNLHQFLQHSSGFLQDQITEYVNSLESSSMDRASLLSSGPCRGPKVLGDIVESIAGAILIDSKLDLDLVWRVFKPLLSPIVTPENLELPRFRELNEWSDKNGYFIGIKCENRGDSTMAILNLQLKDLLLVRQGCGKNKVDAKAHAASLLLRDLEHVFLLC

SEQ ID NO: 69973 - protein, 71 aa, Zea Mays
MSSSVLRAAADRAIRRQALTLTNAAVSRIRQLLSLRQRPYLRLGVKARGCNGLSYTLNYAASIPTDGGLER

SEQ ID NO: 69974 - protein, 55 aa, Zea Mays
MCSSSISVSPSPLITALCRRLAILTLVLTLHRMPLQYSLEEELHQLIIEEKKNPR

SEQ ID NO: 69975 - protein, 661 aa, Zea Mays
MEPSRGGVGGGGRRWGEAEGDAAEEGRRGEDGGEVSLREWLDRPGRAVEAAECVHVFRQVAEAVAVAHAQGVAVGSARPSCFVVSPPFARVAFIESASGSDASGSCSGSDASEDADGDPDPDPDPDASPPLRRRDSAVPGEERAGRSFPLKSVLAMELSWYTSPEDADDSAATFASDVYRLGVLLFELFYTFETMEDKMRAMANLRHRVLPPQLLFKWPKEASFCQLLMHPVPETRPKMSEVLQSEFLNQSRNSLEEHEAALRLREEIEEQELLLDFLQQLQKRKQDIADSLQGTIAFLSSDINEVPHQQSTIGHCENFLSDGDKEVCSGTVEEQSDCGSRKRFRPELQGVDMEENNRSVEECSRTVPSSELIQESVLSKSSRLMKNFKKLETAYFLTRSKLMKQVGSQISSCDRVVKNTTGSAVGTEGSSLDDFSLERQYGTRQRGWVNSFLEGLCKYLSFSKLKVRAELKHCDLLNSSNLVCSVGFDRDREFFATAGVNKKIKVFEYNMIVNEHRDIHYPVVEMSNRSKLSCICWNSYMKSHIASSDFEGIVQVWDVTRSQVFVGMREHERRVWSVDFSIVDPTKLVSGSDDGSVKLWDMNQAILFLHLLLGVLALLEQEQMCVLYNFNLILLAPLPSALQTTKFTAMIYVTYELLIVH

SEQ ID NO: 69976 - protein, 98 aa, Zea Mays
MARVRSTARVERVGEETEASETLPISEAMQRSGLVTSEKIPHDGAEQAEQAIAEAEEKDIEETDSEDDYRIAMPSKPSHLDFGKSTVSKADLSKMVKS

SEQ ID NO: 69977 - protein, 211 aa, Zea Mays
MQESHELDGTTVVVDRATPKEEDVRYPPSRPSQGGYGAYNAYISAATRYATLGAPTLYDHPGSAYGRGYYGSSQAVGKKIFVGRLPQEANTDDLRHYFGRFGRIVDAYIPKDPKRSGHRGFGFVTFADEGVAERVSRRSHEILGHEVAIDTAAPLENDSAGGGYIDPMDLYGAYGSMRSFGRFCGGLDYNYGYGPSSGSSRSRSDWRYRPY

SEQ ID NO: 69978 - protein, 854 aa, Zea Mays
MRMVEMLSHQLRVDQAILTGESCSVAKEVESTPAMNAVYQDKTNILFSGTVVVAGRARAIVIGIGSNTAMGSIRDAMLRTEDEATPLKKKLDEFGTFLAKVIAGICILVWVVNIGHFRDPSHGGFVRGAIHYFKVAVALAVAAIPEGLPAVVTTCLALGTKRMARLNAIVRSLPSVETLGCTTVICSDKTGTLTTNMMSVSKVCVVRSVHQRPMTDEYSISGTTFAPDGFIYDADGLQLEFPPQSPCLLHLAMCSALCNESTLQYNPDKKSYEKIGESTEVALRVLVEKVGLPGFDSMPSSLNMLTKHERASYCNHYWENQFRKISVLEFSRDRKMMSVLCSRKHQEIMFSKGAPESIMARCTHILCNDDGSSVPLTMDIRNELEARFQSFAGKDTLRCLALALKRMPAGQQSICYGDEANLTFIGLVGMLDPPREEVWDAIHSCMSAGIRVIVVTGDNKSTAESLCRQIGAFEHLNDFSGYSYTASEFEGLPPLERTNALQRMVLFSRVEPSHKKMLVEALQAHNEVVAMTGDGVNDAPALKKADIGIAMGSGTAVAKSASDMVLADDNFATIVAAVAEGRAIYNNTKQFIRYMISSNIGEVVCIFVAAVLGMPDTLIPVQLLWVNLVTDGLPATAIGFNKPDGNIMSVKPRKVNEAVVSGWLFFRYLVIGAYVGLATIAGFVWWFVYSDNGPKLPYSELCVFTGTIVPWPAVNFDSCSTRQTSYSCSIFEDRHPSTVSMTVLVVVEMFNALNNLSENQSLLVIHPWSNLWLVGSIILTMLLHVAVLYIEPLSALFSVSPLSWVEWKIVLYLSFPVILIDEVLKFFSRRSPRGRRFPLRLWRREILPKESRDN

SEQ ID NO: 69979 - protein, 405 aa, Zea Mays
MPSVDEFSALIDHSSSGVELVQFRQGQSKTASDIQPGKSTNPYSLKLESSHAPLVSSSHPLESTSLASSSHVTSDNGFSLHTKSSNRATANGHGRECAQPLGISSERAHQALALEHLENMWTKGKNYKPENVEHVAKVSVGSASLGSTSVQQSVPCSTSVCYNQSNSERPTASSQSKDQHLVRHSTTPTYVTYPNGTPKSLSAEMAEHAGPEDFAVESESSYATEDDEFNNVTGLDSPVTRVWESKSKGNATLSHIHHPLESPGFHRAKKNRSHVGKLKMSRTSSGRKRSRSNAQKPPIWQEVERSSFSVGDSMDILNTSANDLKTHELDEDPEVESMARMFSSSNTSSLLLPSSDSAYSSNYCGANVLQDSYLKLRCEVVGASIVKSGSGMFCCVFYFRDRRQW

SEQ ID NO: 69980 - protein, 438 aa, Zea Mays
MVATNGGNRVVVIPHSMGVLYFLHFMKWVEAPPPMGGGGGPNWCEKHIKAVMNIGGPFLGVPKAVAGLFSSEAKDVAVARAIAPDVLDSDFLGLQTLRHLMRMTRTWDSTMSMLPKGGDTIWGNLDWSPEDGLECKAKKHKTNDTEVSKDSNGENIEVQPEPINYGRLVSFGKDVAEAPSSEIEQIEFRDAVKGNDIVHSNASCREIWTEYHELGWGGIKAVADYKVYTASSVIDLLHFVAPRMMQRGNVHFSYGIADNLDDPKYQHYKYWSNPLETKLPNAPDMEIISMYGVGIPTERAYVYKLAPQAECYIPFRIDASADGGEENKCLKGGVYLADGDETVPVLSAGYMCAKGWRGKTRFNPAGSKTYVREYSHSPPSTLLEGRGTQSGAHVDIMGNFALIEDIIRIAAGATGEEIGGDQVYSDIFKWSEKIKLKL

SEQ ID NO: 69981 - protein, 298 aa, Zea Mays
MWERGRPPRKPRPSPILVPPPPSSPPPRLNLLLPRSLLALAARAMPSRRPSPVLLLLLALSLALLFLLLSPSFPSTSRFSRSLSSGSAFASSSPASTSAPPAPVKIYLYDLPAKFTYGVVRSYKAARATSGSADAAATLPDEQLRYPGHQHSAEWWLFKDLLRRRPQDRPVARVDDPSDADLFYVPFFSSLSLVVNPIRSPLAANASGAGTAYSDEALQEELLEWLERQLYWQRHRGRDHVFICQDPNALYRVVDRISNAVLLVSDFGRLRSDQASLVKDVILPYSHRINSFKGREGS

SEQ ID NO: 69982 - protein, 366 aa, Zea Mays
MPSTSAAPTAYPTSPLELIAWGVLATIPVTGDAFPTLMACILIGNLGASVTEVVSDAVVTEFSRTQKAGVLQSYAFVALAAGSLLGNLSGGYILLKTQEPKIMFTAFSVLLGFQLALSLSTKETLPSSRGNSRNRLVKSSLAANFRKQFSNLMTAIREERILYPLAWIMTSFAVVPVLSGTMFCFQTQYLNLDPSVIGLSKVVGQVMVLSLTVLYNRYLKRIPLRCLTTGLQILYALAVLSDLILVKQVNLVLGIPNEIHVLCFSALAEALAQFKVLPFSVLLSSLCPPGCEGSLFAFFTSGLVLSAILSGVFGVGLSTLIGVSSVDYSSLPLGILLQSLAALLPLGWISFVPEKWTADDTVVIKR

SEQ ID NO: 69983 - protein, 444 aa, Zea Mays
MKRFVYINDDSCRYSYCDNRISNTKYTLWNFLPKNLWEQFRRFMNQYFLLIACLQLWSRITPVSPATTWGPLIIIFIVSASKEAWDDYNRYLSDKKANERKIWLVKDGVRIQIKAQEVHVGDLVWLHENDEIPCDLVLIGTSDRQGICYVETAALDGETDLKTRTIPPISANLSVEQLGKVKGVIECPNPDNDIRRFDANMRLFLPIIDNEKSPLTINNTLLQSCYLRYTEWACGVAVYTGNETKSGISRGAAEPKFTAADVIIDKLTIAIFMFQVVVVLVLGYFGNTWKDTQGLKQWYLMYPMEVEGPWYDFLIIPLRFELLCSIMIPISIKVTLDLAKGLYAKFIDWDEQMFDWETNTPAHSANTAISEDLGQIEYILSDKTGTLTENKMIFKQCCISDTLYGNDNGDALNGCLLTHYVLYILLRDNVHPFLFSIKACLLCV

SEQ ID NO: 69984 - protein, 150 aa, Zea Mays
MHATRPPARAYFSGIGSHAARIFRARRARERPKAVKPARPAPRPTQAPATGLHACRWSNLGATAPWAMHMADERAAGRWCGAPPLFKRHGFPFPPTRSNTPGARQSKRNEVVLPPLSGAGARDLIPTARPCRGRAVWPYHWYLPSDAPKA

SEQ ID NO: 69985 - protein, 132 aa, Zea Mays
MEPDVVIMPQPLTYEESYDLLREKIGKDINFAHDLISCCFGMPLTVILLAGVLYGSPTQEAFDELVAKAHVTLEAQTSALNTMKRLVKFGYQQLPNNNVRRCLLYCLLFPEDQGISVKNLALENRWSTPENY

SEQ ID NO: 69986 - protein, 518 aa, Zea Mays
MTDLAKLIISLYKNSVEMEFFTEYGEASQYQIQEVIGKGSYGVVAAAVDTRTGERVAIKKINDVFEHVSDATRILREIKLLRLLRHPDIVEIKHIMLPPSRREFQDIYVVFELMESDLHQVIRANDDLTPEHHQFFLYQLLRALKYIHAANVFHRDLKPKNILANSDCKLKICDFGLARASFNDAPSAIFWTDYVATRWYRAPELCGSFFSKYTPAIDIWSIGCIFAELLTGRPLFPGKNVVHQLDIITDLLGTPSSETLSRIRNEKARRYLSCMRKKYPVPFTHKFRHADPLALRLLERLLAFDPKDRPSAEEALADPYFASLANVEREPSRHPISKLEFEFERKKLAKDDVRELIYREILEYHPQMLEEYMKGGEQISFLYPSGVDRFKLQFAHLEEHYSKGERGSPLQRKHASLPRERVVVSKDGNTEQQINDQERSADSVARTTVSPPRSEDADMDDVKPTSLSSRSYLKSASISASKCVVVRNKHPEPEDDGIPEEMEGTVDGLSEKVSRMHS

SEQ ID NO: 69987 - protein, 445 aa, Zea Mays
MPRTTELESPGCPPLRALTTDILGLVKVVEAHARPAGAAKVVETWGAPDASCAIVAASLADRATDPVLAVARMNGVVELLNPLNGDTLAAVKAVGPAPNDGGAEGDPLTALHLFTRQASDSILGTFLACTEQGKASIRSITKENAASGSHIEPSATWDVCGGANVQFCSVDHGENYVMFGGKGIEVSLWDITSCSKTWSAKSPRTNSLGIFTRPWFTAGTFLCKDDHRKIVACTNSHQVRLYDTALQRRPAISVEFKESPIKAVAADPNGHDVYIGTGTGDLASFDMRTGLDSYLRIWDTNTRQLLSAVFLKQHLTTVVLDSHFSVEEPGEMKSKQLESSVETETEVRKEKKKKSKAITEDETEAQIRKEKKSRTIEEEEQAGLVDHSDINDEVYARKEKKKKKSRGIEGGKERDSDGEICSPKRRKSGERSKCLKKRSKKQLVA

SEQ ID NO: 69988 - protein, 406 aa, Zea Mays
MGDETSTSVAPQEQESTVRAGSVKQQLSRLVLSSLQTTLPDVEVEPMVEVSAKFADYQCNNAMGLWSKVKGSGTIFKNPNSIGQAIAKNLPSSDIIESASVAGPGFVNITLSNRWVAQRIQDMLVNGIKTWAPVLPVNRTVVDFSSPNIAKEMHVGHLRSTIIGDTLARMFEFSNVVVLRRNHVGDWGTQFGMLIEYLFEKFPNWQEIGCQAIGDLQIFYKASKHRFDSDPDFKARAQQGVVRLQGGEDKYREAWKKICDISRSEFDLVYKRLNVVLEEKGESFYNPYIPQVLEELSNKGLIKESEGARVIFIQGHQIPLIVVKSDGGFNYASTDLTALWQSGSYMLQMLVSSSTLTWFSVLQRWPVGSQIQVKRSFRKQAMLDLVLFLVQMASGSEPAVLRLFDW

SEQ ID NO: 69989 - protein, 52 aa, Zea Mays
MRYVTNKAHTSCTLFFFSAHHSMTLPPMFQLASSTNVPCRNSLAYMYTSPPN

SEQ ID NO: 69990 - protein, 90 aa, Zea Mays
MLIPGGQKNPHPRRGRHLVVLLACERRHRAHISVAWRQRIVPFPSNSADPTSSHTSGVSPRFAVGHIHVVILDPDECVCHIHRSSTDLDI

SEQ ID NO: 69991 - protein, 210 aa, Zea Mays
MGQAINKTVMVVELIKRRVGGLHQNSATESVDITDTWEPLEEGLLPLETTRHVSMITVTLSKKPLDTSSPGYQPPIPAEEVKPAFDYDHEDSYPTGRGRGRGGGRRGRGRGMSNGPSPPAYGYNEEWGEEGDYYNRGRGRGRSRGRGRVRGGYYGGGRRGGYSYGYGARGGYYEEQDEYYDDPEEYAPPGRRGRGRGRRGMPWRGRGVYY

SEQ ID NO: 69992 - protein, 85 aa, Zea Mays
MNRGRGDGRVWRARAAPPRPLWGSQPRRTGRERAVGPGHACAGKTQRPRASLSLVSPPRARSDRLSPTPTGTDAASDWYDVHGRD

SEQ ID NO: 69993 - protein, 311 aa, Zea Mays
MDPDTAVASADGGPFLEFVDYAISMLSSSAGDGDGYESPGDGPAPARPPWGWAVAQLLKSCCAYSSGVTAAILLSDLFQSWTEQRKSLTLKRKVKLPKLINTKNKRRRLPNTVTIDSIHEKNFLSPNSVLEVVVIAVFVLPGTNIYMLTLGDMWSASTIDIYLHRRYYDCIGQNGILKKGREVMLTGCCLRTAMEGSGHARILPTEYMVILLDEEQDEDALLLAAQFCNYSFSSLILEESRNNVPYSFYARIEKIESLEPFRCAERMQIILEDNDNAKMKLVLWGEQTSLANLCREHACTGQTFHSKFYRQ

SEQ ID NO: 69994 - protein, 582 aa, Zea Mays
MFIRVYNYNTMDKVKLFEAHTDYIRCVAVHPTLPYVLSSSDDMLIKLWDWDKGWMCTQIFEGHSHYVMQVTFNPKDTNTFASASLDRTVKIWSLGSPDPNFTLDGHSKGVNCVDYFTGGDRPYLITGSDDQTAKVWDYQTKSCVQTLEGHAHNVSAVCFHPELPIIMTGSEDGTVRLWHSTTYRLENTLNYGLERVWALGYMKGSRRVVIGYDEGTIMIKIGREAPVASMDSSGKIIWAKHNEVQTVNIKAVGADAEIADGERLPLAVKELGSCDLYPQSLRHNPNGRFVAVCGDGEYIIYTALAWRNRSFGSALEIVWSTEGEYAARESTSKIKIYSKNFQERKSIRPAFSGERIYGGVLLAICTNDFICFYDWAECRLIRRIDVNVKNVYWADSGDLVTIASDSSFYILKYNRDLVSSHLDGGASVGEEGVEDAFELLHEINERVRTGLWVGDCFIYNNSSWRLNYCVGGEVTTMFHLDRPMYLLGYLANQSRVYLIDKEFNVVGYTLLLSLIEYKTLVMRGDLEHANIILPSIPKEQHNSVAHFLESRGMLEEALDIATDPNYRFDLAVQLGSLEVAKA

SEQ ID NO: 69995 - protein, 312 aa, Zea Mays
MAGKKTTPAKPAPSSTQRNGSAVPGSKSRPKQASEEAAAASAKAQSPSKPRKITKEKPAAAKKKREKTEPQEGGKRRKQQVLADAATPSKKRKKGGEGPEPKEATPAKKHKPAGTPPKKQKAPSKPATPAKKQQSPGKAEKLTPKKKQQSPGKAEKPTPKKKQQSPGKAEKPTPKKKQQSPGKAEKAAPKKQQQQPAGKARKPAAAATSPTKKKQAKREKPTPTKRKRGDDEQAKEAKSPKRAPADGAARASTPVKKKLKDQKAAAANMGVCSFSMARVRQLMRAEDPTIRPSRVLLGEVCRGCLSQCREGS

SEQ ID NO: 69996 - protein, 183 aa, Zea Mays
MYRFSCDQSGFDIRCARVHILGFSFHSSSGECNISASPAEDDPIELLGKQLRLGRGDDVFEKIFSNSLHALQVVQFYYWKKHELAARREQSVVSSGTVCCPVTHHSKGTELPLPCNHALAQTIFGSYNTEEIVQWNDFALAVAMWEKYSEELKKQLLTFLPYWLSNETIYVVDTSELQRAEPI

SEQ ID NO: 69997 - protein, 385 aa, Zea Mays
MLWCSLTLFTMQFVARLTAGIIQTYLECDPEFKYSEVLNPKRFLTNPSTPAHNDGLDNANWDLILYVNLELVNKMSNRRFIVKEMLGQGTFGQVVKCWDTETNDYVAVKVIKNQPAFYHQAIMEVSLLRTLNQKFDPDDQHNIVRMLDYLSFQNHLCIAFEMLGQNLYELLKRNHLRGLKLKYVQAFSKQILDAMVVMREAGIIHCDLKPENILLAPSVATAAAVKVIDFGSACLEGKTVYSYIQSRYYRSPEVLLGYPYTTAIDMWSFGCIVAELFLGLPLFPGATEYDVLQRMVKILGGQPPDELLREAKNTVRFFKHVGSIYAGNAAPIGLSSAYRILSEEEVEARDSKRQKMGKWYFPHLKLDRLICTYPWNNSELAGLAF

SEQ ID NO: 69998 - protein, 738 aa, Zea Mays
MELDWITISTDRKRGCSGGGVGGPGLIKFITLVRPQPSIALLTCPLTSPHLTSPRPRAAKGRNSGPRNKRQKHQQVINSPRQQLRPPLAADVSLTCDVRRHGSDCDSIGALIRMDSAADSSSPRCHHGQYRQDAGELEDQTSTSKMPSSASELPCSLKREVRVLEKRLDDQFVMRRALEKALGYKPCAVHASSVNCIPEPTEELIKEIAVLELEVICLEKHLLTLYRKAFEQQLSPVNSACDAENNKQPARSFSGILSEASVLSFSTPRKHQPVQSSRMVLARKSTPTASTSEASSEKINIGRSHSSLLHRSVRVSPSANNLARALKPCHTSPLSFVEEGKCMEPGVVSLADILGTRVADHVPQTPNKISEDMIRCIAAIYIRLRDVPSAAAQHAFFPSPCSSFSSASGLSSKYTADVWSWSPRCRRESFTEAWQVQDNELGLGGGEARDSGLQYDSVIEVSALCKGDQRSADVKDMLRKYMSLVQLLESVDLGGMKNEEKLAFWINVHNAMMMHAHIEYGIPQSNSKRILLTKVSYIVSGQRVNAELIEYQILCCRAHSSGQWLRLLLHPKWKSGRDRDEELQGFAVDRPEPLVHFALSSGSYSDPVVRLYSPKSLFQQLEAAKEEHIRANVAVGVRGRGQRKIILPRALELYARDAGLGAQEVVAAVACHLPDGLRDAVRRSPPAGRARGGVEWKPHNLAFRYLLAKELVGGSPACGRQQLKKCGPPIGAPLRADR

SEQ ID NO: 69999 - protein, 570 aa, Zea Mays
MQRRVGMADGEARGRTLGAVIKEKDEELALFLEMRRREKERGAAAAAAAVAAADQLLLSGDSVAGDGMLLLGPPPPAEPKPVAYKVAGGGFRRAPGGADDFLHADAGDKNDYDWLLTPPGTPLFPSLEVESKRSPVSQAGTPKTRPTALKSRLSNHPDPPSRTNLPLRTTSSNSLNSASSKGSRPSTPTSRTTVPAKTGASVSRSSTPTLRSTLPSARSTTPSSRAVGPASRTSAPIGRASAPASRSSTPTSRSSIPATRSTTPSSRPSIPAQSKPTSRASTPTRRPSAPSAQHGNLAAPVRSSSISKPGSTMPKGSSPAKTAAPTPSRGSSPTVKSRPWKPSEMPGFSLDAPPNLRTSLPERPTSATRGRPGAPSSRSCSVESGPAGRPRRQSCSPSRGRTLSGSVPSGSSMPAVRRSHLNGGDSVNPVQMGNKMVERVVNMRRLVPPKHDDQRSSLNSVSGKTSNSPDSSGFGRTLSKKSLDMALRHMDIRRSIPNNLRPLMTSIPPSSVHSARSGSTRSRPMSVSDSPLATSSNASSEPSVNNNLMCLDGIYMDDELCSDRAGPYGR

SEQ ID NO: 70000 - protein, 733 aa, Zea Mays
MLTYPILNDRSIDQWTVTELKDELERRYLPVSGSKDELLKRLFEAMQDEILDGEGKTTVVTSPPEELKGGETPGSIDVSVNQASIEQHVHKGASEVAKQGVGLVISVTEAYDESTFATSEVTQEAVVGTAEVSQRSLDAVAEVESCLVDAAATDEPDGNGQGSASSGDTIVKEGSPRSEGHGNTIEKTPEDGTNKKIAVDDEPSDLTGGDIKLGLDVHSKILKLEDEPAPPHDMLHNHEDSDVVAVAEPEDDTSKKMISDDVPTGLMHTNVELGAKVDCKIEQEEVSTLSDAAALHSYPKEHIVAVAKGLALPRRMLMSGYTSNIDLDRKEESPDINSCEKLNLNRSSGDESMDEDVMERKHADSYIKPEDLRGKTKVTSEHVFKDVSLLDTRAEGSPAHSKEVVTEEKLSTPTEKRKLEDQEVIENNEPIKRQYLWNEDAVNISDQQASKITSTGTQKEVICPAPERSFGRPNTVARRNSPKERIVPPAKTSATTSLRIDRFVRPFTLKAVKELLGKTGSICSFWMDEIKTHCYVTYSSVEEAVATRNAVYDLQWPSNNNNYLIAEFVDPEEVKLKLETPPSQIPPISLSTATAQQTATFQQAMANQTLVPPHVPATSRGLLPTPARFAKVPPTSDPGPARESLPPPPLSLEPARTLDELFKKTQTYPRIYYMPLSEEEVSAKRAAHDKAVFRCNHTCHGTAIDRLSSPQLTPPDQQLQLYEELLHRTCPYI

SEQ ID NO: 70001 - protein, 192 aa, Zea Mays
MDEGYSNLPTSHLLGSVPAVTQDDRKLGPPAAQDAAATSRLQEFPPGGGNVGGYRPPGGPADGDVENQADWKGYFNVASYAPYFNVDTDVVVDRLISSVYPMDGFYRKIDANPDMYGPLWITTTLIFMLAVFVFWITPKSCSILVYVGLFSVYLHTCICTFAYSCGISSMGHHSSCWWCIILVHHFKFEGMH

SEQ ID NO: 70002 - protein, 126 aa, Zea Mays
MLSLRQAAVFLDRGPHVYWLSKGTLDVRPDHILNLIHYEDAASLVISIMKKRLRSCIFVGCDNEPLSRLEIMDRVNRSRKFDTQFHGFTGTDGPLGKRMDNSKTRAKLGWQPKYPSFTEFLGLSNL

SEQ ID NO: 70003 - protein, 802 aa, Zea Mays
MSSALSGAHLGFRGREEGISVRRSIQGMANYTAYCIALKAKDHHDLRDMHSLSACAKYLWSTSRATVIRNELATGSWNLNKMVADYMYEEQSRSGSSYDPTSMKGYHYLVDWPLDESKLEARMSYAKELTVDDAQIIDIERIFMCSELSSELKDVCLSFSLFLLLRRRFFGFVCVEASQRKTHDFVFKGVLSKNQDGTLNYDRIFRLIEVELAFMYDFFFTKYAVLYYGSKKVSAIWSLASASFMSVTIYKLIESVLSNQNRSEFVGTTTSDVTTTSDVVVTILIVACIVLLEFIQVLLFFSTIWCRVSFVCHYVREQATNTRRGFCMKLFQKFCCMRFREIILNMAIGITRSRSSEYYYQNKLGQYSLLESVISCKYKQSPRKVWFHRFMHRYCSLIVAPDFGYLCNTNKDFIHAQRIRKKHVKPAAIKIPVEVKKAVVHSLQRTQGVLANGESSLVYNEVHDLLWACRHNMLSDPGTNCYLDKENQTHIILTWHIATCYCEVQTLKCLYPRVGGALKLHLDIATILSKYCAYLVVSAPKLLPGNYYDSSLVFDAVAVEAAQFLQKVEDKYEALRSLPVSTETSILQRGMKLARQLEEMECDKCWKVLADFWAEMLLYIAPSENVNEHFEALANGGEFITHWWALLTHAGILERAPRNVNNDIENQWEGSSSYGCPSTTQAAAAACATNQQPMAGDRTVQLIEMNVGDIEDAKTDRHYPGEISYGAALRLRRANSYISKCREAATLATSATIKPAIRGNCEQVRMMIRQQAYLGQNVELASPSASTAPSENKEIEIVIACE

SEQ ID NO: 70004 - protein, 100 aa, Zea Mays
MTRVIHDSGDGMQKEALDLVSSDVNFPKGCFPDYRIGPNNQIIDPEETHEAVPLKEVVAKETAQLLEQHRRLSVRDLKEKFEKGLSSASKLSEELLPNVS

SEQ ID NO: 70005 - protein, 721 aa, Zea Mays
MHPGGLGRCREKQRKESSRLQTVNRKLSAMNKLLMEENDRLQKQVSRLVFDNGYMKNRLHSPSVATTDTSCESVVTSGQHNQQQNPAVLHPPQRDANNPAGLLAIAEETLAEFMSKATGTAVNWVQMVGMKPGPDSVGIIAVSHNCSGVAARACGLVSLEPTKICERSLTQSTGGPSGPNTPNFIRAEVLPSGYLIRPCDGGGSMIYIVDHVNLNACSVPEVLRPLYESPKILAQKMTAAALRHIRQIAHESSGEMPYGAGRQPAVLRTFSQRLSRGFNDAVSGFPDDGWSCLLNTDGAEDITVTINSSPNKLVGSHVSASPLFSAMGGGIMCAKASMLLQNVPPALLVRFLREHRSEWADPGIDAYSVASLRANPYTVPGLRAGGFMGNQVILPLARTLEHEESLEVIRLEGHGFSHEEVLMSRDMFLLQLCSGVDEDAPGACAQLVFAPIDESFADDAPLLPSGFRVIPLDAKTDVPTATTRTLDLASALEVGSGGSGMRASCDGSGTCATRSVLTIAFQFSFENHLRESVAAMAKQYVRGVMASVQRVAMAIAPSRLGSRIELKHPPGSPEALALATWIGRSYRAHTGTEIRWSDTEGADSPLMLFWKHSDAILCCSLKPPAFTLKFANSAGFDILETTMVNIQDLPLEAVLDEEGQKALSAQLPAIMQQGLAYLPGGVCRSSMGRQASYEQAVAWKVVGDDGAPQCLALMLANWTFI

SEQ ID NO: 70006 - protein, 149 aa, Zea Mays
MEADRKAMSNQVIYCLDGARIGIQYETFFAGEPCEIFHCVLESKSFLEKMIMIEHTLPFFLPVRELESDLLSSNSIKFIDHLEEILQAYIDRREQVRLIKELYGNQIGELFHSLPYNMIEFVLEDFECIRRHCAGATPCFEEDFILSGQ

SEQ ID NO: 70007 - protein, 482 aa, Zea Mays
MGKAARWLRGLLGGGRKDQERRASPAPPTADRKRWSFARSSRDSAEAAAAATEGSVRGGGNAAIARAAEAAWLKSLYDDTGRQQSKHAIAVAAATAAAADAAVAAAQAAVEVVRLTSQGPVFGGGGPVPVLDPRGRAGAAVKIQTAFRRFLAKKALRALKALVKLQALVRGYLVRRQAAATLQSMQALVRAQAAVRAARYSRALPALPPLHHHPPVRARFSLRARRGGVQPALVREHRVGVVRRRVRPEPQDRGDGHGAAPVARVVPAHRGRVVRAVGVVAAPAAAAAAAVPAPAPVPPPAPAHRGAHVAPLPGLRLVRAGEAAAGDGAVHAPLRAADPRQERLRRRGQRRRLPRRVARLSRVHVEHAVVGGQVVVPVAERAEAAAAGAAGAAAAAGPEAGAAQRGGPGGPREPGRRRRGHAQAVQYPRAGAGRVRLPHRRREPVRSARVGRRRGGGRAAGSRIVLPAEEVVKVNRSTARPG

SEQ ID NO: 70008 - protein, 1034 aa, Zea Mays
MFAKRLFHRALGVGRGGGGGASAPAASPADAIQMDAQISTHCGVPYTASLLAFDPVQRLLAVATLDGRIKIFGGDNIEGLLISPKSVPYKFLQFITNQGLLVAISNENEIQVWNLEFRQLFYSSQWDVNITAFAVIERTFMMYLGDENGLLSVLKYDVDDGKLQIMPYNVHIHSLIERSGVSLQDPQPIVGILIQPDTFGTRLLIAYERGLLVLWDVSEDRAVSVRGYGDLRMKGQINGAQGDSGEDQLNTTIDDSEEEREICSLCWASREGSTVAVGYITGDILLWDMTTKSSRQEKQSDVSSNVVKLQLASGSRRLPVIVLHWSAGSAVHSNKGGHLFVYGGDDMGSEEVLTVLSLESTAGLESVRCMSRTDLKLDGSFADMILIPDTGVPDKSRTSALFILTNPGQLNFYDGGSLFSVQNSKEGTPLPEAQKFPVAIPTLDPNITVTGLYSLTESEFPNISLKKFCARKNAGHFISENMKWPLTGGVPNEMSLDEDHAVERIYIAGYQDGSVRIWDATFPVLMPMFVLDGNVADVNLDGANASVSSLAFCSLSMTLAVGTTSGLVRIYKLREHTGGSSFHFVSEFKQEVHVVHHGKGFHCYVAFLSANSSVLSLLFMASGGLLAAGYQNGQVAMLDPSQLSILFTVDGASGTNSPVVSLGIYSVAASAAKADQSKKDNPQNATLSRDVLLSLTKDARVTVLDCTTGVMINSHIIHQKQSSAISMYVIDAESDETQTQLSEDKIPSQGQTGKDGNDLDKIQTQGIEKHLKNASQLSQNGGSDSLLVVCCEDVLLLLSLASLIQGSSKHLQKTKLAKPCCWSAVFKNMDDKVCGLILAYQTGTIEMRFGPDLAIVAETSLMSLLRWSYKTGMEKSTSSSNGQVTLVNGSEFAIISLMASENDLRIPESLPCLHDKVLAAAAEAAMSFSTDQRRKQNPAAGIIGGFIKGMKGKAEENAKMRESLTLRAPSEQLESIFSKEPFAEPSIPDLDDPMEELSIDDIEIDDEVAVALAQAASSTSQGNKRTGGGESEAV

SEQ ID NO: 70009 - protein, 160 aa, Zea Mays
MILVGPISFDFREIPWDWVPLLCLRPKPCRRHPYLPSQLWPCRLSSSPFDPRPVQASRYADSYSAAPLPPPPPSRRSPLTTPPSPAGWPSPASIRTTASRSGSPVDRTRWRCACSPRPGRRQRGGRPVMRRIPSPRHSWTGSSELSSTTVCAPRAPTRRG

SEQ ID NO: 70010 - protein, 140 aa, Zea Mays
MVLAGLFEMMVLPALPAILAPNRRESCSPNLRWRRLHCRWRCQVCSGVCRWEGMVCSGSGQVVSLSLPFYGLTGTLSTAFGNLTFLRMLNLSSNSFRGEVLATIVRLAHLHALDLSYNAFSDAHDISQCNKISENNYKLW

SEQ ID NO: 70011 - protein, 337 aa, Zea Mays
MPLGDGAEAADFVLPDELLAALPRDPYEQLDLARRITALAVSGRVSGLEREAGRLRAEAAGKDRENAELRERVVLLDTALQETNARLRAALEDNIKLSKERDSLAQTSKKLARDLQKLESFKRHLMQSLRDDSSSPQETVDITTCDQPVATKASFSGDGGSGSHPTTNIFSESLDAGSTASRPPIQKYALSSHITPWLTPKATPKIMSTSASPRQISTTATPKLMSGATSPTKSRIEAHMSMTPWYPSSKQSSAASSPPRGGSNPGRTPRVDGKEFFRQARSRLSYEQFGAFLANIKELNAHKQSREETLKKAEEIFGPENKDLYLSFRGLLNRSMP

SEQ ID NO: 70012 - protein, 96 aa, Zea Mays
MLLLGVRFFLKLSFDIIRYRDILFAVIISSYFKLFLFTMMVWEFPSSVIFIVEMFVLSSNVVALRVSKSPLFRGLLTSARSKILDPAMDPWNAMRA

SEQ ID NO: 70013 - protein, 494 aa, Zea Mays
MAAPALRITARLGLALDGATAARRREASAPVAVPAAPWLKKAAVRCQRAVGAAVAEKKDAPVSVAQDRSGDGGAAPELTVVMKFGGSSVASAERMREVADLILSFPEEHPVVVLSAMGKTTNKLLMAGEKAVGCGATNVSELDELSFVKELHLGTLDQLGLDRSIVCGLLDELEQLLKGIAMMKELTLRTRDYLVSFGECMSTRIFAALLNKIGVKARQYDAFDLGFITTDDFTNADILEATYPAVARRLHVEWINDPAIPIVTGFLGKGWRSGAITTLGRGGSDLTATTIGKALGLREIQVWKDVDGVLTCDPNIHPKAKPVPYLTFDEAAELAYFGAQVLHPQSMRPAREGDVPVRVKNSYNRRAPGTLITKARDMSKTVLTSIVLKSNITMLDIVSTRMLGQYGFLAKVFSIFEDLGISVDCVATSEVSISLTLDPSKLWSCELVQHKNELDDVIEELEKIAVVHLLQNRSIISLIGNVQRSSLILEKKRK

SEQ ID NO: 70014 - protein, 274 aa, Zea Mays
MAGSVRIRCACAAPCTSRNPNHDSQVTFPTFPGIEAPPSSRGPAAPNCRCLLKCSSSSTDSASSSSPKWYSLPRSSTPILWFYVWFYTSTMGRKRLVVRKASGPSRIDDSSNPSELSDGTGGVSSPLPSSSPLPGSCPLPGSSSLPGSCPLPGRSRIDGSLPVPSNGTGGVSNGDGDIGGDVPVPVKGAKPIVSRAECWKHMDKREIVENGIKSYIAVCHYCKTELSADSAGGTGHLNRHFRACMKKAGQTFGTGVQTQLNFAADGTEQWMKLT

SEQ ID NO: 70015 - protein, 331 aa, Zea Mays
MSTLPWNVLIVLSLSASTWEIRTLYTSGSSSPKCVVTLMLEIAPSFWGRWKRRHSNFDKSIPFALLSQVAGIREYFAANPALTSELPSTVVKSKASETLIIQSEHEDSELGDEFYDALTRGESFEDGDSDDDDDATTPKVVGGDPLLELLAVDWFKVNERFDSVALHPKSLVQSEAAKKLPFILVINLQVPAKPNYNLVMYYAAERPVNKDSLLGRFIDGTDAYRDARFKLIPSIVEGYWMVKRAVGTKACLLGKAVTCNYLRQDNFLEIDVDIGSSSVARSIIGLVLGYVTSIVVDLAILIEAKEEKELPEYILGTVRLNRVNPDSAVSI

SEQ ID NO: 70016 - protein, 295 aa, Zea Mays
MENPPPSSAGPYSAPAPAAQHQDAAKEDQDVAQLVLNLCIPELREKAIIILSKKREKCEDLALLLWHSFGTMAALLQEIVSIYRLLSPPQLSFDQSTRVCNVLVLLKFPLYLYPFLNTTYKTREYEFLRISSLSVIGALVKSDDHEVIVNLLCSEIVPLCLRAIEMGSELSKKVATFILQKIMLDDTGLAYVCASSERFCAVANVLAQMVEALAEQPSPRTLKNTIRCYLRLTDDRRACQALRDYLPIALRDGTFNGLIEVDLTARLWLHQLLHNVMMSDSGGGPRPAPGPVMGM

SEQ ID NO: 70017 - protein, 892 aa, Zea Mays
MATHYQAATLIASPSYPNAIAWSSDNLVAVASGHIVTILNPAALDGPRGLVGLRHSDPFPIGVVKREDLLEPCLLPTSLARETEPCARSISWSQQGFAPNYGCLLAVCTVNDHVKLYRSPIWELCDEWVEVADISQLLFNYYKIINFGEDNGSHLTSSKNTNSGEAEVLGSTCRSEESLYFRGPGQRKIKPARVGGFIYDGNEVDLDASKDADFSMEPCSKSKKKSLKKTVKPRDEVVAVNGRNSTGNVKASLSSNEQNKSLPLITAKQYACRAAHLSSLVVSWSPVVSLSDRTSCLLRHWCILAVGSKSGNISFWKLYKPEYYTIDAGVVTSDPMLIGVLHAHESWVNAITWQVLSAGSSKSSLLLATGCSDGSVKIWLGNIEGLNQCAIGEEVPFVLVAEVAANLSAPVSSISLGIPARSQHEVSLAIGRVSGLLEIWIWNASTNKIESSSAWHAHDQVVTGLRWAIDGNCLFSCSQDNSTRCWISHENHLEEFFLHSEFSELRESEDLSKVSDRCYGLTLSPGEEIIAVVRSLDLNLLNQMYQVRTQKAVVEFIWIGGQFVGIPLDGSIDICSPQSADLSSSNLMWWGSNILWSLKKYENVEKRLVLWDVVAALQELKKTAPAFLETLVHSWASALFAGDSQCVSITAQSSRSMHDMMPHVSSRKLHLLNIICRKVMLGNHARHGPGAGNNSNDGTTDFWSTLLVASETELRERLVGFTFAAVVKRTACLFNGTSTANCWFPVGVAQMDSWVSMNYEKVHGQLQSIRSKIKELGSRIDGYSDVESCPYCSSPVRFESPDVAICGERHTLSRCRTSMTLCSVAQPVWHCSCCGGTVDKLLPESFFTMPLDAVRDDKGSLDLSAASAPLCPFCGVLLQRSMPAFLLSTSPV

SEQ ID NO: 70018 - protein, 348 aa, Zea Mays
MATAAADDDVKLESFLQWLQSNGADLRSCTIRACGGKGLGVFSTAAPEPGSNDGVAMVVPLDLAITPMRVLQDPLVGPRCRALLEDGVVDDRLLVMLFLMAERRRPGSLWKPYLDMLPSTFGSSLWFTEEELAELEGTTLHRATLIQRKSLQSSFDEKVKGLVEELLHVDESASSVEVLFEDFLWANSIFWTRALNIPLPHSYVFLGSCGDQQARADNDAHQEIDITAKDCSADENSKPSNTESIWVEGLVPGIDFCNHNVKALATWEVDSVGNATGIPASMYLLLADKSPAETGAEICINYGNKGNEELLYLYGFVVDNNPDDYLMVTLIMMFIILWKLLDRSSLLI

SEQ ID NO: 70019 - protein, 247 aa, Zea Mays
MALDDACAYDCCALPPPLHCLDWDWDSELLHTHRHTTSAGGAAVQAEPPTFFVPATRVQPSAASSGGYLHDAITHWSDDRRSKRQRMAAAVATTTTPPARRPATTVSEDLQCLLAGFWDSTSEAEGGADFRHDLNTTTPEPEPETTTEIRCSFASGEDREKRGVGVLYPFAVVKPLGLDDGRMTTLSDVNHRILKRPARPVRHPVGPFACGPAVSAHGLGLSGKVVVSLTKIRTGGNGTITIIRTRG

SEQ ID NO: 70020 - protein, 316 aa, Zea Mays
MQEEEEAEFGRLPGMPRRFTFEQLQEATDQFREKLGEGGFGSVFKGRFGEQAIAVKRLDRAGQGKREFLAEVQTIGSIHHINLVRVIGFCAEKTHRLLVYEYMPNGSLDQWIFCRQGQGDDDAPRLDVKPQNILLDDNFDAKLSDFGLCKLIDRDKSQVVTRMRGTPGYLAPEWLTSHITEKADVYSFGVVVMEIISGRKNLDTSRSEKSFHLITLLEEKLRSDRLVDLIDMCITSDSQAQEQEAIQMMKLAMWCLQIDCKRRPKMSEVVKVLEGSISVETDIDHNFVVTNPPSFSAPRIVVMSAPPLASEVSGPR

SEQ ID NO: 70021 - protein, 275 aa, Zea Mays
MASSLAARRLLSRAAAVRRFPVPFASAPAPAMAPRSFSADAGPPPPLPPPPPQPVVEPPTSEGAGASSSSTTAGAGGAHRSSPGAAAGARRQGGAGYEEEQEKVLRASLLHVPRMGWSESAMVAGARDVGVSPAIVGAFPRKEAALVEFFMDDCLQQLMDRIDAGEGEQLKNLILSERLSKLVRMRLEMQAPYISKWPQALSIQSQPANVSTSLKQRAILVDEIWHAAGDSGSDIDWYVKRTVLGGIYSTSEVYMLTDNSPARIETKVFHCFGVP

SEQ ID NO: 70022 - protein, 207 aa, Zea Mays
MMVIPFFQHASTSGETPLPGKMNPRIDRSGSNETSKVPRLGSIVGTASMAGFGKAVEILDTLGCLMTTLSSDGGFVSRTKTKGCKISILAFEVANTILKGASIMQSLSEDTVTYFKQVVLPSEGVQNLVSSEMSELMRIAANDKREELKIFSQEIVRFGNRCKDPQWHNLDRYFVKLESENAPQKQLKETSIAEMQKLMSLVQRFVS

SEQ ID NO: 70023 - protein, 282 aa, Zea Mays
MMESQPLQAPTATAPAPGSAEPAGAPPAVTPGKEFTRTCKGLVVVLIGGYVLLQLLPSSLNYLAIIPSKTIPYVWTVFTAGYIEQVLPGAIGSSLGLLFCGKDIEPAWGRKEFLKFIILINSICGILAFCFAIGLYYVTGKESFLVTPLSGFHGCLAGFLVALKQLLPNLELPMCFFWKIKAKWMPFFVVCFSSIMAFIVPDSINFLPTLVSGMYVSWLYLRYFQRNPLTGLKGDPSDDFSFPSLFPAAMRERGERVLEERLAADNAGDTEASPRGHGTAED

SEQ ID NO: 70024 - protein, 75 aa, Zea Mays
MLSLIYAGQVERDPIPLYQAARELINMQLDTGDFPQQEHVGCFNSNFYLNYPNYRNLYPIWALGEFRQRLGANKK

SEQ ID NO: 70025 - protein, 85 aa, Zea Mays
MGRHNSSDMAAWERSGHQGDKVAIRTLLKLQGYNLLDAVLSRLLIFLLVAVASVAFSLICLSQQLRTSPLLCIISKKQQQCTTIP

SEQ ID NO: 70026 - protein, 278 aa, Zea Mays
MSSSTSGTREMLSPNSTATSIGQVQKVPGFAKLQGENFVYFMQTYSIMLGRTSRSYTADFDLSKYECGSQCVSRCHACIFYDFELRHFAIEVLGRNGCTIRGVSYLPGSVPIKLNSQDLIEIAGIKFYFLLPSRSIFATLAARDATMLPPQSPSLLHPNYPGNPSANDCGRSNGENGVKISNDMQGKLVKQKRSFSGELDISYSYGTKKNVDRVGTLDGCDKDTDNQQILLEEEKDVTTCLTTLISELSGPKEWVPMERLLSEGKQVLTTKGHVWLFN

SEQ ID NO: 70027 - protein, 241 aa, Zea Mays
MIHVIHIAVGDVNTGENQVKEIKDLQRQFSNRPLWMAASIHRGEEEVILRIHEELVNVYPVLLLILVPRHPEDCKNISLALKKQKVNFVLRSTREVVSSITRVYMVDTLGELRMLYRVTPIAVVGGSFLPGLAGHNFSEAAAAGCAVMTGPHVGHFYHMLVEMWQINPLAVKQSVLLFIQVSGEFELLQTLKELLGDASTLGARQRAAKDAFSIMSDGVVNRVWDLVCRLGIDSQTNTLSS

SEQ ID NO: 70028 - protein, 324 aa, Zea Mays
MASAAATTTSAPAQNLNPLSINIKLPPWLSGLRCPFTFVCPPPPPPPPPPPPPPPLPPTEPVVPRSRRLPSLRVTTEYDSEEGVFVNKVSCKLAGDLAKLRLSFQSDPQGQWQGGGEEGDPLQQLFAAPLVGLITKRFSVLYDVEARNALLRGDCSLPGGAVQLRASHDVKAQQGEVSVITSLGDPLYKMELSSLVPYSGLPRATFHFPIGQVSVEEKRNEDDEKVLSVYGIGKSDFLDGVLTAQYNENDLNLRYCYKDKELTLVPSVSLPSNAVSIDFKRRFGPDDKLSFLESQKEMETSTVTSSTLMNGMLFINIKWVKISK

SEQ ID NO: 70029 - protein, 840 aa, Zea Mays
MPPPSASASPSASRFAKHWIADVLAGEESVDFSLLKVLVGASSKPLAGAPEATRERVALRSIQEVLSVIAAGGDAAATAGVLSVDGARSCEDGLFRLIREVGSFGELEKDLLPPFSQDIQENICTKKFTLPGISFQLLERVEPWIASMAPQPQMEHNGTEQCVNDQSLRSSHGCVNIEKPVFHTDNAGVQQETMADVVNESETGNLQKDPPAPTFIFHQPCMPESRSYVPPQEDTIDAVGLGARSSERSPIVEGNMSVGSVLASDGCDVPLQGSITEPFFQQDKHDHTVIVGPKSCKRKSPIPSYCAHGDGADGGGSSNQSSKVSIREGPSTHATVTSGFDRISDVLPTDAPESEHLPECITAQDTTISQPDSRKAHLSALQQERGEKVTQDLEDISANIGSVEKDHIHGDLTLPSASVLLSISCNGANQGSKYETNLQPGTATEDMMAFEEQNADKSHLEVSGINKANQALHDDGGVMKNNTVHGGLIVQTAPVSQNCNVTLHDKTSEQENEKNIQKDNCHTYVPGSSQDRGGESAKKTTNELKSGDISSKICVHFNVQDINDTLEDLSQQGLCIKCGEGGQLLECNGCFLAAHSSCFGSSATFEGTNFFYCPVCLYKKATEAYKKAKKTYCETRKNLVAFLGTAQATNQPDKQLNGAQPGAANRDEEPHDEQHSKGCGASKGAHENEVYNLAHQDEEHHQQRKKQKINAIVLQNNNKTPVKDPEKKQQAVNEEARKEGGNDNSSHETGASSPRRCDPPSNQDVEADQDDSLTTSNQSGGSDEIEATSSNDSAKQSSPPWRGMGHNKKGLHEKEPAVSSKSGKVKKVNRYSFARFTKHD

SEQ ID NO: 70030 - protein, 411 aa, Zea Mays
MLSGKEVVDSQTHDSSNNIQAQIRRRSRLPDPIEKEKGISLWSIIKDSVGKDLTRVCLPVYFNEPLSSLQKCFEDLEYSYLLDQAYQHGKVGDSLMRILKVAAFAASGYASSVARPCKPFNPLLGETYEADYPDRGIRFFAEKVSHHPMLIACHCEGKGWKFWGDSNLKSKFWGQSIQVEPVGILTLEFEDGEIFQWNKVTTTIHNLILGKLYCSHHGTMHIKGNRQYSCKLKFKEPSLLDRNPHLVQGFVEDNNGNKASFLIGMWDESIYCSNSDTSKVKSADQLKGASLLWEKNKPAPNPTRYNLSSFAITLNELTPGLQEKLPPTDSRLRPDQRHLENGEYEKANAEKLRLERRQRMSTKLQDNGWKSRWFEQDTEDGTYCYKGGYWETRERGFWDGCLDIFGEFVET

SEQ ID NO: 70031 - protein, 80 aa, Zea Mays
MYKTDRHKYENTARTWTQSAACGAECCCIVSLGSCNSQCQKKLVLGTILRRMALQASPCLRPSSLHQSSCWKKHNVLSLE

SEQ ID NO: 70032 - protein, 79 aa, Zea Mays
MIEYVITHVIVLVHVDVLQLDKFKRPIISGSIMPDCSVYVYLARLFLHSCLLSDQVDLCLHVGCVESRRVRIGSRFFGL

SEQ ID NO: 70033 - protein, 765 aa, Zea Mays
MAEADSCLESFELYESESKFYILGTNCNKTIWRLLKIDRMEPSEVNVHEDSTVLSQSDYLDMLKNLDEQHRSTGGVKFVTNCFGIIGFIKFLGPYYMLIITEQRKIGDIFGHMVYQVSKTAMIELSNSTTRPKLINSKDENRYKKLLQTIDLRKDFFFSHSYHIMRSLQKNFNDPQEGWELYDTMFVWNEFLTRGIRDILKTTLWTVALVYGFFKQDKLAICGKDIMLTLIARRSRHYAGTRYLKRGVNEEGRVANDVETEQIVYEDMLGPWQISSVVQNRGSIPLFWSQETSKLNLKPDIILHGKDKNYEATRLHFENLRKRYGNPIIILNLIKTREKRPREIILRREFDRAIKIINSGLPGEDHLRYLHWDLHKNSQSKSTNALQVLLKVAFEALNLTEFFYRQVSPAQRAENSPNLSPTLKNGFGPHVCDDDNNCGNADYVDDLDDISQEDTCGNYDPGNGIAEDRSEVNGSTQIKPPKFQKGVLRTNCIDCLDRTNVAQYAYGLAALGYQLHALGSVESPEVHLDSPLSRHLMHFYERMGDTLALQYGGSAAHNKIFSAKRGHLKFAIQSQEFFRTLQRYYSNAYMDAYKQAAINLFLGYFQPQVGKPALWEPESGDEHVLDDETSNGPNGVLNSALTGSKNEGQHPNWSSDSVHGMSSASDNSMSKSRYTPTVSHIKHISCELDYYNGSGDSNFLDLDWLSASDNERSKAISTPDVNISTDDGVHDVIYGITDDQAAEIQAQGLSKDFVQWVNQGETFWY

SEQ ID NO: 70034 - protein, 69 aa, Zea Mays
MDNAPRARRCLLFWLLSGNIFSSWQGRAGQGGRRRREAVLCCSVALPRTDVIRRYSSGICSLLWLFTSC

SEQ ID NO: 70035 - protein, 254 aa, Zea Mays
MVTRGGGSQSYGFPIYCAAWLPLAHIIKPDPPAAEADADDPSSSTPSLPMAVLGGGGGEGRSGVPNKLVVAALATGEEAAPALSPDTVVEVNSEEEVPYRMAVHPRGDGVFCAFPNGCRLYRWESQEGEGPQRLALEPDQDALAELKDVGLQLAVSFSGEGSILAIGGEDGYLRVFNWPTMGSVLTEIDTKTSIKDLTISSDEKFLAVNRSSGPCRVWDLQSSEVVASLPRETWNNRRKHHRSWLKRHADTCNS

SEQ ID NO: 70036 - protein, 77 aa, Zea Mays
MHTRFLPLRRLRINTVQGCVAQPHLGAADASSRGCASRGSSGEAPGRGMRCTEPPTEWLARRRRARMTKVHFFLVVN

SEQ ID NO: 70037 - protein, 486 aa, Zea Mays
MVNIKEQCLRVLVTRLCFFLCTRHAAVEEYQGLQEWFQMETEKYTALIQHRHTAEIEAFTEQLRLKDEKLEAFRWRAVSMDVEAARLRSRIHELEGRLARHEKHSAALEALLQDRESENRALEEQLETLQAQALGVEICTPARGSGQDDGLDDQCIACSPVDAVQRTMSSGSSRHQEGAEVSKYETKLDELVTLSPEDHKEDATEALVVSVGDLACAVAAAATSVEHERRHDAPASRQSFRSEIEEEEEVYTEPGNAHTTGSSQEATSELALVVVPPGHKSSAWKTDIHALAVSYKIKRLKQQLLVLERLANECKDEEAAATKPSGSEASCSGGGGSRQQPRSRYHTMMSFLSKHVRRYQSLDDKIDDLCARMEESKRSAGRGAGEESQSQSAALGQFLEETFQLQRFMVATGQKLLETQSRIAAGLARDRCCCGDGEDGVDMKRLMEVAGALLRDVQRGLEVRIARIIGDLEGTLTFHGILRSTR

SEQ ID NO: 70038 - protein, 773 aa, Zea Mays
MRGRFGRGREQSGRTCTTRLWTPIAAAAGSPLLPGAMRPCSRILAARHFVRSFRFDPSQTTSPAAGFRRLTGANRPFVPKPLFGILLGGFRSNCGVLPGKGVPLGSLGSFLPDSAYQLHGARLQRDTRGNAFSTSANAVTVKKPVGDKVQKDASKKDIDEEIADSQILKNLGKYLLLNDSPDFRFRVALSLVLLVGAKVINVQVPFLFKLAIDWLAALGGAEASLASFTETNATLLALFASPAAVLIGYGIARSGVSACTELRNAVFSKVTLRAIRSVSRKVFSHLHELDLRYHLSRQTGAINRVIDRGSRAINYILTVMVFNVVPTILEIGMVSSILAYKFGSTFAWITSVSVATYIAFTLAVTQWRTKFRMAMNKADNASSTVAVDSLLNYETVKYFNNEQFEVEKYDKYLRNYEDAALKTQSSLAYLNFGQNVIFSSALSTAMVLSSYGIMSGALTVGDLVMVNGLLFQLSLPLNFLGSVYRESRQSLIDMKSMFQLLEEKPAIKDEPHAQPLQFKGGCIEFENVHFGYVPERKILDGATFTVPAGKSVAIVGTSGSGKSTILRLLFRFFDSTSGSIRIDGQDIRGVTLGSLRKCLGVVPQDTVLFNDTIKHNIQYGRLSAKDEEVFDAARRAAIHDTIMNFPDKYDTVVGERGLKLSGGEKQRVSIARVFLKEPSILLCDEATSALDSTTEASILNSLKSLSSDRTSIFIAHRLTTAMQCDQIIVLEDGKVVEQGPHDFLLSQGGRYAELWYQQNSTDAMDSAAASVEV

SEQ ID NO: 70039 - protein, 450 aa, Zea Mays
MGVHGAVAKRPCSRQHLLLLVVAILIGSYFAAAAAAAADEQKSRNRGAGRRSRRRRAAAAVTSPPAPLMVPITILESAVDLGAVCMDGTPPAYHLHPGSGAGNNSWIVNLEGGGWCNNVRACQFRKASRRGSSDLMEKEIPFSGIMSSSPVDNPDFYNWNRVKIRYCDGASFAGEAFDKVNGFYFRGQRVWDATVRHLLSIGMAAADQVLLAGCSAGGLAVILHCDQFQAFFPRSNNAAAAGGTTTTTTVKCLADAGLFLDAIDVSGGRSLRSYYSDIVAMQGVGPNLPPACTARLDTASCFFPQNVIDGVNTPIFLLNAAYDAWQIQESLAPSGADPSGAWRACKSNHSACDATQMKFLQGFRDQMVASVLGGRFAGSRSNNGLFINSCFAHCQSELPATWSWSHAAGASPAIQSRGIAKSVGDWYFGRAQVKAIDCPYPCDGTCRNII

SEQ ID NO: 70040 - protein, 95 aa, Zea Mays
MTHRLLPLLLLLPLLAPPAASARQGAGQDLGQFPGLEYGLPPFAAALRASCPVSTEGYSPPEEVKNQSHILVLASGGPRKAQTMLRFGTARLVKQ

SEQ ID NO: 70041 - protein, 1259 aa, Zea Mays
MALGDLMASRLVHSSSSRGLSSSPTPPLPNQHHHQNHNHTGDGLLAASGPEPRNGLEADEVDKSAPVPYLPQLVVLCEQRHEPEGIDEAAAAAAGPSTSGLVSKWRPKDRMKTGCVALVLCLNISVDPPDVIKISPCARMECWIDPFSMAPPKALESIGKTLHSQYERWQPKARYKLQLDPTVEEVKKLCNTCRKYARSERVLFHYNGHGVPKPTSNGEIWVFNKSYTQYIPLPITDLDSWLKTPSIYVFDCSASGIIVKAFLERLDWSSSSSASSRKDCILLAACEAHQTLPQSAEFPADVFTACLTTPIKMALHWFCKRSLLRGSLDLSLIDQIPGRQNDRKTLLGELNWIFTAITDTIAWNVLPHDLFQRLFRQDLLVASLFRNFLLAERIMRSANCSPVSYPLLPPTHQHHMWDAWDMAAEICLSKLPQLIADPNAEFQPSPFFTEQLTAFEVWLDHGSEDKKPPEQLPIVLQVLLSQSHRFRALVLLGRFLDMGPWAVDLALSVGIFPYVLKLLQTSAMELRQILVFIWTKILSLDKSCQVDLVKDGGHTYFVRFLDSLDAYPEQRAMAAFVLAVIVDGHRTGQEACMNAGLIDVCLRHLQPENPHDSQTEPLLLQWLCLCLGKLWEDFPDVQLLTLQTNTPEIVLCLLSEPQPEVRAAAVFALGTLLDTTSSNGADDDSDYDEKVKAEINVVRSLLQISSDASPLVRSEVAIALTRFALGHNKHLKSVAAEYWKPQSNSLLKSLPSLANINNPNNVYSPNNILQGSIGPVLRVGSDSSAAGRDGRMSTSSPIATSSIMHGSPQSDDSSQLSDSGLLLRENASNGGPGYTRSRPVDNVIYSQFISTMCSFAKDPYPRIATIGRRALSLIGVEQVVMKNTRFNSGGAHRGETSASNFGMARSSSWLDMNSGNNLIKFRTPPVSPPQHDFLPGLRRVCSMEFGQHPISSPDGLAVPLLSSAAATSNAELSILPQSTIYNWSCGHFSRPLLIGSDDNEEANARREERERLALDYIAKCQRSSCKMTNQIASWDTRFELGTKTALLLPFSPIVVAADENEQIRVWNYDDALPVNSYQNHNLSDRGLSKLLLINELDESLLLAASSDGNVRVWKNFTQKGGQKLVTAFSSVQGHRTAGRSIVIDWQQQSGYLYASGDMSSILLWDLDKEQQLSTIQSSGDSAISSLSASQVCSGHFAAGFAAGSVRIYDIRSPDRVVYTARPHAPRTEKVVGIGFQPGFDPYKGFTYSIGGSPACPSCC

SEQ ID NO: 70042 - protein, 350 aa, Zea Mays
MAGTERLHRPIDPPRPAGSRSVVVGAGGSPARWDDDNDDCGGGGRVEGLAGLHIFDQEAEESPTKNDMANSLDTNCTPIAKGCNTETTETSVESEPVNVLNLLHDHTGIWVPVSVPPMTALASEDWHRGFRCNGGHFPEEEFSWELDEDNKEMTMWDVFADMAVAAKDKVISAAKYEYGRCGMSTVSNFFLQEAWKDMAQTLVDANTGIANELLETEPTKWLPDSAATSCMLCGVRFHPIMCSRHHCRFCGGVFCNGCSNGRSLMPPKFRTADPQRVCDVCGVRLESIQPQLMNQISRASQLPTRDVTDLSTLRSWLNFPWSHTMEYEIYKAANSLRSYCGKTETREVYP

SEQ ID NO: 70043 - protein, 536 aa, Zea Mays
MHSRLRSLRQGQVHVGPITWEVLPHPIREAKRARGGAKSTAAGSDKPPPATKPAVLGPSKSSAGARAVASNAGKPPSAEPTKERRPPSSVRTDEAAAGGADFDTDICVDDYLVGEFFCNGNDGQGYDAGSDVGQLAVVPGSVADTLPMAAVGAKGTSQDPWSKVCASGEISSATAAKDVAGSVSQQLRHASEQLKHATAFTDHVASGALTSEFTAERQRLEGRIERLQAQHADAARDKSAAENRSRRLSERLVAAEAEKEDLMRQLAEERRDANRACAEAQAAQAKAKLARAKGSLARQRVEEMETRLGGLRDRLDKMEASTRVEVERTHSQLVDAYWELGARTAPFEAPGQDVGLCFLGWLQEELEVLSTILTGLMSFASLVTCEGGVNALSREGCGHFEVFDQSDKGFEREIFQVEDPELKRLAGALFDMMWGPYGRETVRERSDRALDQMAHDEEVEDLGDLVSTLPEAWGWSRRPHPMLARAPWRPPCRLELTKASCRPLRRRVRTLRRWWVNQLPKTQQRRSGRPRWRNRG

SEQ ID NO: 70044 - protein, 627 aa, Zea Mays
MSLQVANINAKEETPVGHGEVICFSIYSANSDVQAADFGNGKTCIWVDVLDGGRGVLMEFAPFFEDSSIKKVWHNYSFDSHVIENYGIKIAGFHADTMHLARLWDSSRKIDGGYSLEGLTNDRRVMDTVPEDLPKPGKTSMKTIFGRKNIRKDGSEGKVVSVEPVKKLQREDRELWICYSSLDSMSTLRLYDSLKSKLTTRRWILDGCPRGTMYDFYEQYWRPFGALLVKMETEGMLVDRGYLSEIEKAAIAERKLAADKFRKWASKYCPDAKYMNVNSDIQIRQLLFGGIENRHKSGETWPHSKTFKVLNEESVATEGKKTSKYRTIKLCSIVEDLKIDMFTPSGWPTVSGDALRSLAGKIPTEYIYTIDDIQDDDEYTSGSENPDGNSSYGTAYEAFGGGKNGKEACHAIAALCEICSIDSLISNFILPLQGDHISCAEGRIHCSLNINTETGRLSARTPNLQNQPALEKDRYRIRQAFVAAPGNSLIVADYGQAGGDFHSRTAMNMYQHIRDAVQEKKVLLEWHPQPGQEKPPVPLLKVSVKEARDTLKLWYRDRKEVLAWQKSQKKLASEKGEVYTLLGRSRHFPYLTQYGPGQRGHIERAAINAPVQVRITNCGSMGTLHCF

SEQ ID NO: 70045 - protein, 633 aa, Zea Mays
MAKYGLRPRTLKGELFALLSKAGSCGLKVSVLAKSSEIIDLNVSSPLELEQLISLALSSDITLFEKIAPSAYRLRVDPQIKGEEDSMSDSDDSGSVDEDEDASRSDDGSDGSQKLKFLENESRLARRKEKNAHGSPNKCSEIDESYSGEKWLLALMEGEYSDLSIDEKLDCLVALIDVVSGAGSVPRLEEPQRVLHNVPRVHPPQSGGKIKKSTKNLCQYSDESLNGSGSLDCCHQGQSGRRKNQDYTTDPGRNDLPIAAHGPQVVLLGSDRRYNSYWLFLGPCREDDPGHRRVYFESSEDGHWEVIDSPQELLSLLSILDSRGTREAHLLTSMEKRQACLFEAMKKHVEGGKAARLPASSDSYCSQTSSGDGTSPKTSSVDGASSVSDIENTSVPTSLKDSNLDSSSAVVIESGRGGDEKISMWERLQAFDKWIWTSFYSILTAVKSGKKSFKESLLRCGSCHDLYWRDEKHCRICHSTFEVGFDLEEKYAVHVATCREPELSHEVPNHKFLPSQLQALKAAIHAIEASMPEAAFTGSWMKSAHKLWVKRLRRTSSLPELLQVLVDFVGAMDVDWLYKSSSARLRTNLDDIIVDFQTMPQTTSAVALWVVQLDALIAPYLDNAMARQLVNAR

SEQ ID NO: 70046 - protein, 167 aa, Zea Mays
MEIVAISDQLRHGPHLRPPVTRSAHRPPPPGNGSSAAPAASSCSSLPSSPGLTRAPPAAAAAALPRALPVQIPAPLPLLPLLVRAQQLRCSQRRRGRPRRGRRWREEWQPRRLLGDERRGAHGAVRYGHVQGVRPRRPALQQARVRRPAETPSHRHHRPGCGGSITT

SEQ ID NO: 70047 - protein, 160 aa, Zea Mays
MPGANVGMPGQMPHFPQPGQHMPHSNQVPPVSQGVPMVYQPARPMSSAPMQPQQQAAYAGGHLLTMGAPMQPLTYTYQPTSIPPVVQPWSTGPGQSVTHVPPLVQSGHQQVSAPTTLPPVNLSEPSSSDWQEHTAAEGKKYYYNKKTRQSSWEKPVELMT

SEQ ID NO: 70048 - protein, 645 aa, Zea Mays
MDAGAGATAIRVPYRHLRDAEMELVSLNGGAPGGDTGPPPPPPKDQPRSRADRTKLVLACMVAAGVQFGWALQLSLLTPYIQTLGIDHAMASFIWLCGPITGFVVQPCVGVWSDKCRSKYGRRRPFILAGCIMICAAVTLIGFSADLGYILGDTTEHCRTYKGSRFRAAIVFILGFWMLDLANNTVQGPARALLADLSGPDQCNSANAIFCSWMAVGNILGFSAGASGEWHKWFPFLTTRACCEACGNLKAAFLVAVVFLLLCMSVTLYFAEESPLDPKDTQGLSDSAPLLNGSRDAAHASNEPNNERFPNGHVGLNNVSANNNTEEFTNVNSNTEKGGVFNDGPGAVLVNILTRMRHLPPGMHSVLLVMALTWLSWFPFFLFDTDWMGREVYHGDPNGDLSERKAYDNGVREGAFGLLLNSVVLGVGSFLVDPLCRMIGARLVWAISNFTVFICMMATTILSWISSDLYSSKLHHIIGANKTVKITALVVFSLLGLPLSITYSVPFSVTAELTAGTGGGQGLATGVLNLAIVVPQCRLEQVHGTLCMEEGIPRRSSWLRSSPWQQVCSQFSSCQSCPTRTNLPGSMDLADAHAQNTPVCHVKHHTNTWPHFAIRLQRNDSFFLVQLQNNDSESRSLGEREREAR

SEQ ID NO: 70049 - protein, 65 aa, Zea Mays
MMMTLLMPLLLDLCTCLHTFLHHSAKDISLEAGERLASPNGDRMQCQNCLAKIQLQRRCWIFSGS

SEQ ID NO: 70050 - protein, 587 aa, Zea Mays
MEEHQQSNHAVGRKGVGRKGGMRMVPTIIANEVSERIVSASVGANLIIYLTTKYHLGAASSAIIIFVYLAAANFLPVCGAIVSDALLGRCRMVTLTLFSCTIGTTLLCLTSVIARLTPPDCVQPNEGCAPPTPMQLLVLCASLGFMALGASGVRPCCLAFAEDQIAHWDTAKKDRALRALFSWYYASVGFSQIVAVTVLVYFQDKMGWKVGFMVSAAIMASVTLVNCAAASFYVKVKPQKSMWVGLLKVVVVAVKNRDLVLPEADHGAQFHCLPGSTQTVPSNKIRFLNKACMVRPRPGNSTSDDDYGSTSAGNACTVEQVENLKSALSVMPMWSAMVMSFLLQSSSFGVLQAATMDRRVGATRFQIPAGSISVFEILTFTAWSSCYDACIVPVLRRMTGRQRVLTLKQRMGVGVSLAVASMAVASAVETHRRQHAATTAARHGDADGAAPPLMSALWLAPQYVLMGLSGAFGAIAQIEFYYAVLPKSMGSFVLALLFFGSGVASIMSTVIVKLVNVVTSGKGGGGGAPWISDDLDQGRYDSYYALLAVLGAVDLVYLVVCANVFHESTQNMTLEAGADGQDGEARG

SEQ ID NO: 70051 - protein, 306 aa, Zea Mays
MCARPPEVLKTYIWLQCFDGSIQQVEEEVAMFCPMICQEIVKNGTGSSKNHAIALPERVNPANLSLILDYCRFHQITGRSNMERKSFDEKFVRIETERLCELTSAADSLQLKPLVDLTGRALARIIEGKTPEEIRDIFHLPDDLTEEEKLEPLKNINDGPARIRLLNRLYAKKRKELQERHKLKDVQVQKEQKDERSLDELLSFINGDGGSGGRKATKSKKKNKRKDHVENPPKADSEPVNANPDMQDDAEYPFEDADLDDGLDPAMKEELDREVEAFAKRLDSVWKESHIGGNGSARRFPGFNHM

SEQ ID NO: 70052 - protein, 189 aa, Zea Mays
MQSLQDKASEWSGVAAADAFAIDDVNIFEYLGGTPQPFVDLSTNFYTRVYEDEEEWFREIFGGSKKEDAIQNQYEFLIQRMGGPPLFSQRRGHPALIGRHRPFLVTHRAAERWLHHMQQALDATESIDVDSKTKMMNFFRHTAYFLVAGNEMTRQQGHGVACKHATMCLYSIPYTMELKQPPHSKKQWY

SEQ ID NO: 70053 - protein, 391 aa, Zea Mays
MPAPSLPHGRHWAPCHSIVAAPLLIAFELLLCIYLESIRVRNHPSFDLKIVFLPLLAFEAIILIDNFRMCRALMPGDEESMSDEAIWETLPHFWVAISMVFLIAATTFTLLKLSGDVGALGWWDLFINYGIAECFAFLVCTRWFNPMIHKSPTHGEASSSSAAIRYRDWESGLVLPSLEDHEQEKLCGLPDIGGHGTPPSARYIPIFALFSPLFILQGAGVLFSLARLVEKVVLLLRNGPVSPNYLTASSKVRDCFAFLHHGSRLLGWWSIDEGSKEEQARLFYTESTGYNTFCGYPPEVVRKMPKKDLAEEVWRLQAALGEQSEITKCTKQEYERLQNEKVLCRICYEGEICMVLLPCRHRTLCKSCAEKCKKCPICRVPIEERMPVYDV

SEQ ID NO: 70054 - protein, 212 aa, Zea Mays
MELEADFADEDVSSNNGLQDLWSLDEIDSKRARFPCCIVWTPLPVVSWLAPYIGHVGICQEDGAILDFAGSNLCCLPVNLAAHVCKQSYSHSEVGAAMSWDDALQSGMRRFQHKYYNLFTCNCHSFVANCLNRLAYNGSVEWNVLNVASLVWFHGQWVDKMSFARSFLPFLTVTCIGILMAGWSFLVGMAAFSILLIGWFVFTVYCVKGLIC

SEQ ID NO: 70055 - protein, 617 aa, Zea Mays
MIVDRCKTSIVDFHRSCKRCFYDLCLNCCKELRKGEIPGGEEVEYVPPEPKGRSYSFGKIHLLKDADRSKNSSNGESYNGMPAVGNSNNGLLLWKAKSNGSIPCPPKEVGGCGSTLLDLKCLFPEKMFAELEYRADKVLRSGTLAKAMVSRSDRCPCFNQSGKIRTESKSVREAASRKGSSDNFLYCPVAIGIQDDDIVHFQMHWAKGEPVVVSDVLQLTSGLSWEPMVMWRALRERSKGKAEDEQFAVWAIDCLDWCEVEINIHRFFSGYTTGRTHARTHWPQMLKLKDWPPSSSFDKRLPRHGAEFISALPFREYTDPRYGPLNLAAKLPAGVLKPDLGPKSYIAYGFYKELGRGDSVTKLHCDMSDAVNILTHTAEVTCQTDIGLIEKIQKDMREQDLQELYGGLNSRSELKLSPAPTECRDESVDEGLKTSYSREGNCVNRDNYNGLDINALPPDDDGDIAKDKESSPGSEWQSELGQSSDHNNGVNTTDEMYNGAHYISHNQKSTGRKVGIKPQEEKSEKADCSGTCAYLKGSSEDNPEMPIVESSEEQSTGGALWDIFRRQDSDKLQDYLRKHCSEFRHIYCNPVKKVLNPGRLNRSLVKLFSFLLDVLTK

SEQ ID NO: 70056 - protein, 271 aa, Zea Mays
MAPAFPRRRPTSPDSPPHTAAAPMAHPPCSPPWPPGGGFGLPESPPNVSPPNQSEKSTGRSFCTSRTGEGRGARQHYVPAGRVSPGPMASAMSSRSRPAGHFGVFPVNAMAGTGGSDGGVQLADKLKIIKTDNFDPDAYVQSKCRAMDEKKMVVFVMQQAVWNVDTNNEAVQGFRRSLHDETRLSYMLSCGSLERLLNMRNLKLWMVRMTMMKTMMTRMMMIMIQRRTRELLEGKGNRENDLQSASSSEQRRCALCKALELPLLQSLNLQR

SEQ ID NO: 70057 - protein, 381 aa, Zea Mays
MAEECPPTGGGVELWLPDEFLDDDFFSEEEKAAVAARSENDDEEEGADGLPRRRAGLVVGNAKGQGDGSPANAEVLAGSPQSILCGLQDYGEDSPNGAASKVCSPPSSPLERPPADPWDVLKEAAGQVARLRTNSTPVPTNDAAANQGLPVTPPAKKLSAPAETAKANHSQPPNNSVEERRIQIARFNALKQRQLLKHRRDRELAVATAAAWGTSVAGSHRAAAAAAGGYGAPAPAPAPRVLSSYAWPPLQKQRQAPASPEGVRALFLAPPPGATRECAGTGVFIPRQAGAPAEPKKRPACSPVLLPVRVVQALNLNVVDLGARPIYPGGFVLDHVACSCRDLASSDALVSRSNALLASRPSQLHHGASSREVNLPQEWTY

SEQ ID NO: 70058 - protein, 92 aa, Zea Mays
MMHMIPNKKWCNSCSKFDYQVASDSLFKAEIWNFSEECLVWSAFVINPCGFGLRTVWRSCSPLYREQVLSSKIALVLHKKRSKSGSKLCCQA

SEQ ID NO: 70059 - protein, 155 aa, Zea Mays
MPGSNHRPVGARTTVAVSSLAGRSHCTPLIVGRRARAYSMHVVPPYCASRRATAPPADTHARILAGAAVYKFRDHNRSMEPGRTWCRLAGRRAGTAYGTRAREVRRPVWRPRAPKLRAVCVWSPSGRVYLSSVASELRQRGARAPLRIVLHMHLA

SEQ ID NO: 70060 - protein, 58 aa, Zea Mays
MTISRKTPGPPPHFHLAFLSCFLSYLASVKGSVITNNNVIGLLFPFIFAQSLDLEKKV

SEQ ID NO: 70061 - protein, 930 aa, Zea Mays
MASRPPLRTTSVASVSSSTESPTSTGPPGGVPQSITALLNNPLPSAAASSYSWLSWPPPTITLPDAAPPPPSHPCEVTRADFAPYLAAVSDPFARFADIRLHASAELAAASDAEGAPAVSSGLAACLREVPALFFKEDFALEDGPTFQVACPLDDEALQERLGQHLDVVEAHLVREIALRSESFYEAQGRLRGLDGEIVTTVGRIRELREVVRVLTGDLVGAARQVQELNATRGNLVTLQQKLTVILYVSQALTALKLLVAAADCAGALDVIDNLQNLLDTDELAGLYCFWHIRDQLGTSLDSVNSILSAEFVHAAVPDGKAVDVMILSTVKRKASSPLNGTDHEGNVDEEESFILRDRLLPLIICLLRTDKLPAVLRIYRDTLITVMKASIKTTVGELLPVLTARPIDSDSVTGDRATDADAGGQSLANKLRSLSSEGFVQLLSAIFRIVQVHLQQAAEVKRIVEWVMGNLDGTLGVDASNPTLQHGGTVIPDTQENDSSRGSNTLTRSTSKIPFVQGKTNDFSIINSLKNVRADVLRENTEAVFAACDAAHGRWAKLLGVRSALHPRLRLQEFLIIYNITEEFIAATEKIGGRLGYNIRGILHQQSKQFVDYQHNVRMTKIKAVLDQETWVAVDVPEEFQAIVLSLSSTYSSVNGMEMPSTDDNSKFSDHRSTSQEPTYSAKNIADNGKVTSGTGENKVEFTSQTENNVAGNLKSTLQTIVHGGVGYHMVNCGLILLKMLSEYVDISKCLPSLSLEVVQRVVEILKLFNTRTCQLVLGAGAMQVSGLKSITSKHLALASQIISFMHSLIPDIRRVLFLKIPEARKHLLMSELDRVAQDYKIHRDEIHNKLVQIMRERLLANLRKLPQIVEGWNGPEDNDVQPSQFAKAVTKASGSNIPFTYYRSIFKIGSQYSLWQRIGMLLICASFS

SEQ ID NO: 70062 - protein, 582 aa, Zea Mays
MVCFFFRSGGNWSTTYAPSPFYMTSKMRSLYLEGYEYSIFDLTRPDRVQIQIYGNSVQGRILDGDSPTELLTSYTESTGRPPVLPRWITSGAVVGMQGGTDAVRRVWGQLKDYDVPVSAFWLQDWVGQRKTAIGSQLWWNWELDDAHYNGWNDLVDDLRSHGIRTMAYCNPCLVPVHTLRFVHGSCQRRCPAAPACFNCVLVQMDEKPSAKRHLFEEARKLGILVRDDAGEPYMMPNTAFDVAMLDLTNPAAHAWFKSTVLRGMVDRGVSGWMADFGEGLPLDARLHSGEDSVAAHNRYPELWARVNREIADEWRASRRRAAAESDDIVDDDDGLVFFVRSGFRESSRWAMLFWEGDQMVSWQANDGIKSSVVGLLSGGLSGFPLNHSDAGGYCTVDLPPFLRYRRSEELLMRWMEVNAFTVVLRTHEGNRPGSNCQFYSSGRTLAHFARCAKMYKAWEFYRARLVGEAARTGLPVARHLFLHYPADERVQALTYQQFLVGTEMLVVPVLDKGRTAVTAYFPAGAGAWRHVWSGNEYGTGAGVQGGFEAQVEARIGYPAVFVRAGSSVGERFVSNLRNLTVL

SEQ ID NO: 70063 - protein, 72 aa, Zea Mays
MERGAVVLPLQGAGVGRVLLPVQVRVRSFLRSRRATERRRRLASSAAPARCSKMLWGGFTGAEGGDQPPALL

SEQ ID NO: 70064 - protein, 68 aa, Zea Mays
MAADDLGSNPMINISLGRQTPPTLPNAVPKNLILVSAARSTNQIPFGYINTNQINHSQNEHNVRENHS

SEQ ID NO: 70065 - protein, 1273 aa, Zea Mays
MATQPPSTATAAVDLYETASQPDAPAAGDAYTFLEFNTQGDDFDYPDFPELSQPPPRSTPLTSSIPGAGTSSSSWPAPPPPPSDAASPEPDLTSQDVHTPPASSSSPSPRSASKARPSAAADGLASGVVALNFEDPVGTGAVEDGYDYSKGDFVEHACRYCGIHNPACVARCNVPSCRKWFCNSRGNTSGSHIVNHLVRAKHKEVCLHKDSPLGETILECYNCGCRNVFLLGFISAKAENVVVLLCREPCLSVNALKDMNWDLSQWCPLIDDRCFLSWLVKVPSEQEQLRARQISAQQINKVEELWKTNPDASLEDLEKPGVDDEPQPVVLKYEDAYQYQNVFAPLIKLEADYDKMMKESQSKDNVTVRWDIGLNKKRVAYFVFPKEDNELRLVPGDELRLRYPGDSSHPTWQSVGHVIKLTAQEEVALELRASQGVPTELNVGFSVDFVWKSTSFDRMQGAMKTFAVDETSVSGYIYHHLLGHEVEHQIIRNTLPRRFGAPGLPELNASQVLAVKSVLQKPVSLIQGPPGTGKTVTSAAIVYHMAKQGQGQVLVCAPSNVAVDQLAEKISSTGLKVVRLCAKSREAVSSPVEHLTLHYQVRHLDTSEKSELHKLQQLKDEQGELSSSDEKKYKALKRATEREILQSADVICCTCVGAGDPRLSNFRFRQVLIDESTQATEPECLIPLVLGVKQVVLVGDHCQLGPVIMCKKAARAGLAQSLFERLVILGVKPFRLQVQYRMHPCLSEFPSNCFYEGTLQNGVTVNERQSSGIDFPWPVPNRPMFFYVQMGQEEISASGTSYLNRTEAANVEKIVTTFLRSGVVPSQIGVITPYEGQRAYIVNYMARNGSLRQQLYKEIEVASVDSFQGREKDYIILSCVRSNEHQGIGFLNDPRRLNVALTRARYGIVILGNPKVLSKQPLWNSLLTHYKEHECLVEGPLNNLKQSMVQFQKPKKIYNDRRLFLGGGQGVMHGTNFGAGASSQAADKRSGRGKGQSFAPYGPPNGVHKPGVHPVGYAVPRMPFPPFPGAPHSQPYAIPTRGLHGPLGAVPPVHQPGSRNFGSARSNTGGPIGGHLAHQQNSQQAMGSIGSNFNYTGMENPSSQPSGGAQMSQTGLMTQVPVQGLSQTFRDGFSIGGMSQDFFVDDFKSQGSHVPYNIAEFSTQASQGGYGVEFTQAPQSGYSGNYMNQNSHPGYSHIGTTNDIVSQDHMAHGSHGMFTQAGYNDPSQDESSQIHYGMAAAGPLQSQGMMNPLYSQSYAHYNTQPQSLQPPPQ

SEQ ID NO: 70066 - protein, 161 aa, Zea Mays
MCTASAQNPIPIDMVLLLDYALVPARHQSDLPLKCGIQMLCFLTSCIIFEEMPVYPDGRVCISILHPPSEDPNGYELAKRKLPCSLIVSVYGPIYNGFTVNGKTTRDYYIVFGLDLEWFGVHNDDASELFQGLDDFHSPAVNLTRLAVSALPNWHQAANGT

SEQ ID NO: 70067 - protein, 58 aa, Zea Mays
MFYVVQIESDGPCFPTDGDRLKGHVLDRLCKNFFSFIKKVGLEDSYFSYFEKRNNKKL

SEQ ID NO: 70068 - protein, 766 aa, Zea Mays
MDCSQDPQEESHQRRENGEEAEKTADYGNALSRKEVTEELLGCVVHSEEEAYRLYCDYGHRIGFSVRKGKQSYFIGTKNIRTKDYYCSKEGLKYDEPVTEANFNRPDTRTNCKAMIRFRVDEKGRWTVIRFVPVHNHQLAKPGERHMLRSAKSLAVGKSGVIDPLASTEAHPINGFSDMTGDIVENSGYTIRECYNQVGMQSITVIEAGDSQSLVSYFKHKTNEEGMFYWDVQVDQEGRMTNFFYRDGKSRNDYGCFGDAIIFDTTYRTNKYNLICAPFVGVDHHWQNVVFGCAFLLDESVTSYAWVFKSFLESMGGRSPKSIFTDQDEAIMQAVKQVFPNTQHCFSYWHILKNAQSHLGSLNTSQAFQSMFTKCMQGSDSEEDFKESWTAMIQEYKLQDNNWLIDLYTFHHKWCSAFNKDTFDGGINSSQWGEVSSNILNGISDENTSLTRFALLLEKVVKDLRRNESEEDFRCSQTAPVRAIKHSTVLKQAAESYTHRIYKLFEAEFLDGCGATSCHETSSGGNLLRFGITMQGRGSKVWDVVLDTSTMEISCGCRKFERMGLLCSHALKVFTLQNVDTIPEKYVLKRWTKDARRSMYTLAQDDSTQQECTEAELAYRNRAMQYAYNLIIKSQELEESRKIFWDSLETGEKALEVFFEMRNMRTQAAKDADKNVKKKKKTSKGTNPKKAKQAPGVSSTGPELIVHTNEHQFQSSQDAQGNATIGRPYYYQAFPNAPIQPNQMYMHTNMHTMPLCTPQESCLSFH

SEQ ID NO: 70069 - protein, 755 aa, Zea Mays
MIRDQQEKAQLERNMRERDAANTRKLMERQLSKEEQEELTRKSQAMDNNDTSDLRKFSRQAYLQKRRDKKIEEIRDEILDHQYIFQDLKLTEAEEKELRYKMKIYDLVKEHVETPDDVGAYKMPEAYDMGENVNQEKRFAVAMQRYKDPKANDKMNPFAEQEAWEEHQIGKSKLQFGSKDKKPSSDEYQYVFEDTIDFVKSSVIEGTQPEDDSDKEDVEAKDILKRELQDERKTLPIFKFRDELLKAVEEYQVIVIVGETGSGKTTQIPQFLHESGYTAKGKVACTQPRRVAAMSVAARVSQEMGVKLGHEVGYSIRFEDCTSDKTIIKYMTDGMLLREFLGEPDLASYSVVMVDEAHERTLSTDILFGLVKDISRFRPDLKLLISSATLDAEKFSDYFDSAPIFKIPGRRYPVEIHYTKAPEADYIDAAIVTVLQIHVTQSPGDILVFLTGQEEIETVDEILKHRTRGLGTKISELIICPIYANLPTELQAKIFEPTPEGARKVVLATNIAETSLTIDGIKYVIDPGFCKIKSYNPRTGMESLLINPISKASANQRAGRSGRTGPGKCFRLYTSYNYMHDLEDNTVPEIQRTNLANVVLTLKSLGIHDLVNFDFMDPPPSEALLRALEQLFALSALNSRGELTKTGRRMAEFPLDPMLSKMIVASEKYKCSDEIISIASMLSIGNSIFYRPKDKQVHADNARLNFHTGNVGDHIALLNVYNSWKETDYSTQWCYENYIQELQLIRNLCNGPWMI

SEQ ID NO: 70070 - protein, 390 aa, Zea Mays
MGPFRLVAEEGKSKCSWVSLDDITNCLIRGDSEKSHHHQRVAELQRLRSIFATSERQWIEAQVENAKQQAILSILKAQVSSDEAHIHRDIHSLRRKGSELAGELSTLSQKVQALVSETIPCLCSELAQLQGTYILQGDYDLKVMRQEYYINRQKTFINHLVNQLARHQFLKIACQLERKNIASAYSLLRVIESELQSYLSAVNTRLGHYNSLIQAASEVREQGAIDDRDTFLHAVRDLLCIHSNVQATVPTYMSAHALVQQISALQSDLLSLQSELENTLPADRKRCINELCTLIQTVEQLLFASSTTAEPILTPWPLMRALDDMENANAQVEVSVEEVTKARTQKIKIFENRAHEVGRERQIFVDFFCNPERLKNQVRELTSRVKALQD

SEQ ID NO: 70071 - protein, 282 aa, Zea Mays
MDQAADSSELLRRIEELQREKDEKQNSLELLLRRIEGLQYEMDEKVDLVEVLTRQVENLQRERDELRKDIEQLCMQQAGPGYVSVATRMLTQRTAALEQDIENLQKKLGGCLRENQNLQEELAEAYRIKSQLAELHGAALSKNKDLEKQVRFFQSSVAQAFAERDSSLMECEKAKEREEAVSRKFADFEERMREYQSEIDEQKHLNDDLQRELTELKAHTELSLKVILKFYDLRCRDSGCSSSLTIEEKCSILLGDSADNWSFSSDGGTSTLKYIVNHPYPL

SEQ ID NO: 70072 - protein, 246 aa, Zea Mays
MKHVAKRCAPKISDSGDDDTPVTKPVVKRRASIFDSDSDEDDNVPISLALGKKDNAKVAEETEHQNGQANGITKKRIIDVKKRKQSSISEDPASSMDMTDANAPSVSKQVDEIKKKSKKKMRNQSGENNEKQSNIRTLDDGLVVEYLSMGNNDAKVASDGCKVYIKYVGMLKDGKIVESNVSEKPYKFKLGAGKVIRGWDVGIHGMRVGEKRKLTVPPSMLSGGKSVGEVPENSSVIYEIELVKVK

SEQ ID NO: 70073 - protein, 214 aa, Zea Mays
MVAATIAGMFLVCFESLCTCFGTKRKDESEDHVLAEHSNSLSSYQMRSVSDRISASSLRAPASPSRFSLSSPPSRNEPLNISLEHVVKLTHNFAPTLMIGEGYFGKVYRATLRDGRVVAIKRAKKENFVSLRTEFSNEVALLKSIEHKNLVRLLGYIDKPNERILITEYVPNGNLREHLDGQHGLVLGFNQRLEIAIDVAHGLTYLHLYAAHNT

SEQ ID NO: 70074 - protein, 159 aa, Zea Mays
MEDAMSTCNSTESSDVEYLNNNDDPSMTSSSHWWASDRPHFSDSMDVAEFNWRKHSPNHYTYKDPRLSTTLACEIYESLREAETRKMPPTNFLETTQTDMSKTMRAILIDWLVEVTEEYRLVPETLYLTVNYIDRYLSVKEISRHRLQLVGVACLLIAA

SEQ ID NO: 70075 - protein, 208 aa, Zea Mays
MISEWQLQPEVEDRHVFSMAPTGTYSAKTAYEGFFLGSVVFPHHKRIWKTWALPKWRFFIWLVAQKRVWTADRLAKRGLVHPDKCPLCDQEDETIDHLLVTCSFSREFWYLLLRKFDMHSLAPQPDVGSYPGWWESVGNIVNGLTKKGLDSLVILRDSILWKDRNKCVFDGCSPSVTMSLRAVDEERAKWEIVGAKGLSHLAAPLAES

SEQ ID NO: 70076 - protein, 505 aa, Zea Mays
MQVPVGFLGKLWSFVSFVPFFVLLLLLGSIKAALVGPVTASIVFFGSSAVIIGLWPAHFIWTYYCVLKTERIGLQLKILTGLLLPLPLLLLPVLASIGSLLGGTGYGVCVPLMATFEAVGEGVTDKLTHCFTDGTVSAMAGACTVVRDVTDFCFHSYFSFMDDLIDKMGDNEEAPLDIKLSYLPRSMVVALIAVPVDVLLISAVALWKSPCMLFKGWQRLCEDLVGREGPFLETVCVPFAGLAIVLWPLAVIGGLLASFFSSFFFGFRAGLVAYQEASFQMGLAYMISAVAIFDEYTNDLLYLREGSCLPRPKYRRADIMRECETEPAERQQTGHHKHRRTLPRSKTFMQTVQRLRPIQIWDWFFRSCELNGRILLSEGLITAQDMEQYITNGKCKKLDTKLPCWCIFQCLLRSANSDSDGLVISDHVQVTTLNWPKDRVLDWLLGPLLLIKDQMKKLEVTEDEEMCLRKLIMTSKNEKPSDWDDSGFPSDDNIKRGQLQSIIRR

SEQ ID NO: 70077 - protein, 704 aa, Zea Mays
MLSQHVLTLTIFLFFLVCFCHSLHDRLTSVTPLYPGDKLVSDNGGMFALGFFNLTTVNSTRSLYLGIWYNNIPERTYVWVANRNSPITTPSAKLVLTNTSRLVLSDSEGRVVWATDNSVVAGGSGTGTGGSGVLRSTGSFELELQLPNGTAGVVWKSLDHPTDTILPTFRLWTNYRAHTAVRVVAWKGPRDPSAGEFSLSGDPGSRGLQIVIWRGTGTGTAGGRSWRSGVWNGAGAFSSINRFVYSQVVDDGGTIYAAYNAAGGPTTHWKLDYTGNVSLRVWNVESSSWSVLFEGPGTGCLGYGACGPFGYCDATGRDGGVQECKCLDGFEPEDGFFRDFSRGCRRKEALQACGGGGEGGGGRRHYFLALPGMKVPDKFLYVRNRSFEECAAECDRNCSCTAYAYANLSGIVTMSATSDVSRCLLWMGELVDTGKDSDLGNNNKKKIGSMAMEIVLPVMACLLMLTSCVCLVTICKSRARTRRWNKEAHERSVHGFWDQNPELSCTSFAELKAATNSFHEANLLGQGGFGKVYKGTLEDGREVAVKRLSNGSEQGKEQLRNELVLIASLQHKNLVRLLGCCIHEDEKLLIYEYLPNKSLDKFLFDPALKSMLDWPKRFNIIKGVARGILYLHQDSRMVIIHRDLKASNILLDAEMDPKISDFGIARIFGCREQQATVTCRLSTLWRASSRSSPTPTASASCCWR

SEQ ID NO: 70078 - protein, 259 aa, Zea Mays
MAVLLRSTSAAASTAGPSSALLATTFRRSRGCLLPRAAPQRRLYVARASAQPLEVCAKESITIPGRLGDCPFTQRVLLTIEEKHLPYDLKLVDLANKPDWLFEINPEGKVPIVKLEEKWIGDSDVITQALEEKYPEPPLATPPEKASVGSKIFSTFIGFLKSKDPSDGTEEALLNELTSFDSYLKDNGPFINGGIISAADLSLGPKLYHMEITLGHYKNWSVPDSLSYVKTYMKERERGVDWRMEGLDAKVCRMAVICT

SEQ ID NO: 70079 - protein, 376 aa, Zea Mays
MARPGPSCCPHARRHIPPCVVLCLAADSRPRAYPYIYRRRRRQGRNISGPGGAVVESQESKATDRRSQPAGRPIRAPARLAVASTVGRSPAELACFPAAVAAWPGPAACCRRLVCGYSGLSCWPRHRRCDTKRRGGHVGNGIVAGSGWSAAGARARARRGQGAAQVDAPAARPLRARRGPARRRRQGDTQVRAEGDGRAGAHAVPPQEAPAEVPAGGGEPRRRFPAGRQRRWHRRAFVLVLGEPAGGRVRRRYRRRAAWRFFQERGADAEEAAGADRGAAAPTAEDRGAGEVPAVRAAPGAGGPRRPRPGLGSRRGGGAGLRGGHRVPVLLLLLLPDAPPLRRQLRDVLLFGGREPGPRRRRHVAPHVRRYARLLR

SEQ ID NO: 70080 - protein, 347 aa, Zea Mays
MAATDDGAVDSASAAAAARAVEEARALLPAPAPDYDDEDLEERAYEAAEKVIVSISGGPDPEDVDGDGDGAELCSSSGSSPPPFSWRKLWLFTGPGFLMSIAFLDPGNLEGDLQAGAVAGDTLLWLLMWATAMGLLVQLLAARLGVATGRHLAELCRDEYPDWARRALWLMAEVAMVGADIQEVIGSAIAIKILSRGYLPLWAGVVITALDCFIFLSLENYGVRKLEAVFALLITTMAVSFAWMFTDTKPNGKDLLIGILVPKLSSRTIRQAVGVVGCVIMPHNVFLHSALVQSRKIDQNKEYQFLQKDFMEARKPVILVLKMLDSIYKRSLVEDFFLYCTSGGLGF

SEQ ID NO: 70081 - protein, 1064 aa, Zea Mays
MVKARMTTTDVAAEVKCLRRLIGMRLANVYDITPKTYLFKLMNSSGITESGESEKVLLLMESGVRFHTTQYVRDKSTTPSGFTLKLRKHIRNKRLEDVRMLGYDRIILFQFGLGSNAHFIILELYAQGNILLTDSEYTVLTLLRSHRDDNKGLAIMSRHRYPVEACRVFGRTDFAKLKDMLTKPDKADDKEEITSGSTDAQETSQSTNDEVLVTEISEKSLSKKEKKAAAKAKQFGSNAKVNNGAQSNKATLKTILGEALAYGPALAEHIILDAGLVPSTKVGKDPESTINDSTVQSLMESITRFEDWLVDIISGQRIPEGYILMQNKMTAKNITPLEEASINHKIYDEYCPVLLNQFKSREYNEFATFDAALDEFYSKIESQKVNQQQKAKEESAAQRLNKIKLDQENRVHTLRKEVDHCVKMAELIEYNLEDVDAAILAVRVSLANEMSWEALTRMIKEERKAGNPVAGLIDKLNFERNCITLLLSNNLDDMDEDEKTAPVEKVEVDIALSAHANARRWYEMKKKQESKQEKTITAHDKAFKAAEKKTRLQLAQEKTVAAITHMRKVHWFEKFNWFISSENYLIISGRDAQQNELIVKRYMSKGDLYVHAELHGASSTIIKNHKPDTPIPPLTLNQAGCFTVCHSKAWDSKIVTSAWWVYPHQVSKTAPTGEYLTVGSFMIRGKKNFLPPHPLVMGFGILFRLDESSLASHLNERRVRGEDEALHEMEAESRKKQSNPESDEDIGSEGANKETHEDESNGQTTNIQQNNDLELPDLSSNIGTANSSELLPEIQAEETLDNGSSILKEETIEASVSSQLDDLLDKTLCLGPAKVSGKSSLLTSIPSSLAEDDDDLEVKRPTIRDKPYISKAERRKLKKGQVNDETATDSQNGEAVETPGTSKQEKGKAETKATDSKASQPDTSQQEKGKANTKATGSKLSQPGNSQQEKGKGSTHAGNAKVSRGQKGKLKKIKEKYAEQDEEEREIRMALLAVKMIRQKYVINAKRLDIFLAIAQKAHLRWTEMMAVLVEAETIRVPILLLLVATVLWTKTMFKKLVMKRKKS

SEQ ID NO: 70082 - protein, 243 aa, Zea Mays
MARTNWVADKMLDVYIYDYLVKRNLQATAKAFIAEGKVATDPVAIDAPGGFLFEWWSIFWDIFHSSTAKASSTSTAAAFIDHTAKQQQPIGAGTGAPPPHPLHDSREHQMRLQQLLHQHNPHLHTTRDASPPASINALNSDVSAVLASKMMQDRVRNPNPIDSDASQHLLDANRIALLKSPPPSHTGPMPMQQQLHPRNQQLDIKPDVGMPQRTMPADPSSMYASGMMHPKPALLATGHNISA

SEQ ID NO: 70083 - protein, 61 aa, Zea Mays
MVHGQVRRAATREAGQQIAIASTMVGLVECKVYAYKVGLDVIKLLERMQIRQEFRPIHPPL

SEQ ID NO: 70084 - protein, 58 aa, Zea Mays
MSFPLHRQCFLKISISLMMVLGILSVHMKNIDRAEKTEFTNSRRPAWDKKFEEQDSLL

SEQ ID NO: 70085 - protein, 771 aa, Zea Mays
MAPSSPSSARPTRASGRKRSAMAEEIHQNQEEEEEVVAASTAKRRRKAASSGKKPKPTPKQAKPAVAGMKKKGETEKTEPVVDDVCAEEPDEEELAMGEEEAEAEEQAMQEVVAAVAAGSPGKKRVGRRSAAASGDHVPEFIGSPVAAAEAHSNWPKRYERSTAANKPEEDDELKARCHYRSAKVDNIVYCLGDDVYVKAGENEADYIGRITEFFEGTDRCHYFTCRWFFRAEDTVINSLVSINVDGHKHDPRRVFLSEEKNDNVLDCIISKVKIVHVDPNMDPKAKAQLIEHCDLYYDMSYSVAYSTFANISSENGQSGSETASGISSDDAGLETSSNMPERTATLLDLYSGCGGMSTGLCLGAALSGLKLETRWAVDLNSFACQSLKYNHPQTEVRNEKADEFLALLKEWAVLCEKYVHQDVDSNLAGSEDQEDADTLDKDEFVVQKLIGIRYDGTGRKKGVYFKVQWEGYGPEEDTWEPIDNLSDCPLKIREFVQEGRKRKILPLPGDVDVICGGPPCQGISGFNRFRNRDEPLKDEKNKQMVTFMDIVAYLKPKYVLMENVVDILKFADGYLGKYALSCLVAMKYQARLGMMVAGCYGLPQFRMRVFLWGALSSMVLPKYPLPTYDVVVRGGAPNAFSQCMVAYDETQRPSLKKALLLGDAFSDLPKVENHQPNDVMEYGGSPKTEFQRYIRLGRKDMLDWSFGEEAGPDEGKLLDHQPLRLNNDDYERVKQIPVKKVGGLIVLLCLPLLFVLKQSSLFPMTGSQLP

SEQ ID NO: 70086 - protein, 53 aa, Zea Mays
MKRALGSAGLYVGYGLPGRPPSASGHAHPWLASGLQQQRLHDFPMQLHGLELW

SEQ ID NO: 70087 - protein, 776 aa, Zea Mays
MVSVSAAGLAQIMQFLETQGFLDYLERCNTAEENAHNLLDKLQDATGRGQNPLTIFPSQVSDPEIITIANPEIEGLDNRHCYKRFPANARTEEQEEKRKSILALASGASKQVPSSPSIRVNGGPKAESLSPRERAAERERMVLDIKVKLQGLWLRLLRLGATEDPLSSFEYGTILALIESDAEGIGGSGFVECIREHIHSGWQCRLTDEQFIAVKELLKMAITLANSRNDLATIRDALEVSAEMYRKDPNNVQDYVQRHLLSLSVWEELRSANYVTLVTAQLILMATHMAGLGLPDIDSWNMIEKIAERNNLGYKQLIKLRALLTHLQQLRIGYWGVATGKSQPLQSYGMASPHAIDVIDESQQPAEASGLGRSWVQSMFSRDRSLRASSFNRASDGNAVAATGKTEISAAQKKTQTNMRTLRGHTGAITALHCVTRKEVWDLVGDREDAGFFISGSTDCTVKIWDPSLRGSELRATLKGHTRAIRTISSDRGKIVSGADDQSVIVWDKQTFKLLEELKGHEAPVSSVRMLSGERVLIASHDGTVKMWDVRTDTCVVTVGRCQSAVLCMEYDDSTGILAAAGRDITAHVWDIRSSKQMFKLQGHTKWIRSMRMTGETIITGSDDWTARVWSLNRGTCDAVLACHAGPVLCVEYSPSDKGIITGSADGLIRFWENEGGIKCVKNLTLHTASVLSISASDHWLAIGAADNSMSLFHRPQERFGGFSNAGSKVAGWQLYRTPQKTAAVVRCIASDLDRKRICSGGRNGLLRLWDATTSI

SEQ ID NO: 70088 - protein, 173 aa, Zea Mays
MAPHDSGRLDHYKLELHELHYQLTLVQHWCGTSKANQVAVAAPGGRSKLGNLIANDWDLEDPRQNGKIVAHAKGLHVQSSRGEVSDESWHASFDIIFQQGSGLEGSTLQVMGPNVYKGEWSIVGGTGKLTMARGVIYKEELCVVDGMARIGLEIHAFYIPMERKDAAKNVWRW

SEQ ID NO: 70089 - protein, 480 aa, Zea Mays
MRAGGGAPPRHAPLSPTASATATLVPASVAMPTPRLVHLRHLLSFRSALPRPLGPNQSHPLPGSVHPSLLLPRAMAGVAYAGLATGSAEYEEVLGCLASLITQKVRADTGNRGNQWELMSKYVQILELEESIAQLKVVHVAGTKGKGSTCTFAESILRSCGFHTGLFTSPHLMDVRERFRLDGLDISEEKFIRYFWWCWKTLKDKTGDGVPMPAYFRFLALLAFKIFSDEQVDVVVLEVGLGGKYDATNVVRAPVVCGITSLGYDHMEILGNTLGEITREKAGILKKGVPAYTVPQPEEAMSVLMKRATELGVSLQVVHPLDPQKLEDQPLGLHGEHQYMNAGLAIALANTWLERQGHLNRLHVKHSGTLPDQFIKGLSSACLQGRGQIIPNSQVNSENDRDSSLVFYLDGAHSSESMEMCARWFAHATNSDGIQPGPSEQPHTDRDSRKFLLFNCMTVRDPQRLLPRLLDTCAQNVTHV

SEQ ID NO: 70090 - protein, 244 aa, Zea Mays
MAEAVAVAYEEQRRRQIEMNKRKLEELQLHHLSAAVREAAAAAKPSSAKKRKAPVPRDAATEPPRRSDRLANLPEKPMYREVRVNLPFPEGSKSNARVPLDAANSVVVEPLRWSDRLANLPKKPMYHEDSDEERSYAISKAEELVQELGSSFPIFTQPMTLSHVSGGFWLGLPKHFCREHLPKSDETITLVDEEDDESDTFYLAMQAGLSTGWKEFAIQHKLLDGDCLVFQLIERTKFKCCRST

SEQ ID NO: 70091 - protein, 355 aa, Zea Mays
MRELWATGWVHDRIRVVVSSFFVKVLQLPWRWGMKYFWDTLLDADLESDALGWQYISGSLPDGRELDRIDNPQFEGYKFDPHGEYVRRWLPELARLPTEWIHHPWDAPESVLQAAGVELGSNYPRPIVELDAANSRLQGALSEMWELEAASCAAIENGMEEGLGDSTDEPPIDFPQELRMEVDRQPAQPAIIHTPVVAGWRREDQRVPSMTSSLIRAETELTADFGNTSEDSRPEVPSNIHLQARAEREETVDGATGNTVRVNGNQQQQNLQNNMHRVLGIAPSISEASSSWTGREGGLVPVWSPPAASVHSDPYTADEADISSRSYLDRHQQSNTMMNWSQLSQSLTTGWEVDN

SEQ ID NO: 70092 - protein, 93 aa, Zea Mays
MGAFGKDALFGFGLTTYSLLGLGVLGGPLSLPWGLYVLICQRTPEKPCLNDVSDVGSWRRAALIASVFLVVLTLIPLWDELAEELGVGLVSSF

SEQ ID NO: 70093 - protein, 236 aa, Zea Mays
MVLRACAMEGTFGVPYYEWLKPRSSSSTPPPSPSSSSTSSTTVSAPSIDQLAAAAADVVVHDERDAMMCLPLLGRLEGRATTRDLGHNPIKEEEAAGVDLSIGLPAPVTGASGYCSEAAPSSPVDEDEDLEEEEDEKARKRDSDECKVEGAGGERYRSEMVVVSGERPADYMRVGGEEGIVGSRGRRYWIPTPAQILVGPVQFICHVCSKTFNRYNNMQLVLQGTYIFVIYVSIIY

SEQ ID NO: 70094 - protein, 362 aa, Zea Mays
MLKNVEACEWLTGAIRSLEVPNLDPCYVNMRAVREKKAELEKLKTTFVRRASEFLRNYFSSLVDFMISDKSYFSQRGQLKRPDHADLRYKCRTYARLLQHLKSLDKSCLGPLRKAYCHSLNLLLRREAREFANELRASTKAPKNPAVWLEGSGGSGHNGSSSDTSQVSDAYSKMLTIFIPLLVDESSFFAHFMCFEVPALVPAGSPNANKSKSGGNDPDDDLGLMDPDGNDLKPDSTSAELGTLNEALQELLDGIQEDFYAVVDWAYKIDPLRCISMHGITERYLSGQKADAAGFVRKLLDDLESRISVQFSRFIDEACHQIERNERNVRQTGILAYIPRLAQCSQLWRKLHRVILKLLILC

SEQ ID NO: 70095 - protein, 945 aa, Zea Mays
MLLSPRAALYVIAVESRGRGRSVHFFFSPSPSAAPPMPPTTVMLLPACTVLLLCCRLSPAAASSPGDVGGGGARRLLHQPLFPIEWTPPPSPQPDFSSDPATPDGPPGAFFPPTPPVAPAGGGGTTTTSSPTTVASNVPAGASSGSGDGGHHGGPAKGTIVAAGAAATAAIALLAFACAFLIALRARRRGDSQKLLGPDRGSARHHSAPSAADFLYVGTVEPTTPGRHHGSPAADLIGSPYRKLRSERARRDEPTDNLSPELRPLPPLRRAATMGSSDDAYYTPRQRSGGSGGGGVGGETWSEASASSPPTTTTASRRSLPSLTSDCFPPVTAIAAPTPPPARSRRTPPRTRFSAGSTPDIKQPPSPSEPTSRRRLLKPLPPEGPRIAMPMPITATTAEDSIGSASMRKQDYVADGIVGNDEPRPKLKPLHWDKVRATSDRAMVWDQLKSSCSFQLDEGMIEALFMNNSTPTAPPRDAGRKTTVPPFRQEERVLDPKKAQNIAILLRALNVTRDEVSDALLDGNTEYLGTELLETLVKMAPTKEEELKLQDYNDDTSKLGSAERFLKSVLDIPFAFKRVDAMLYRANFESEINYLMKSFETLEAACEDLRGSRLFLKLLEAVLRTGNRMNVGTNRGEAKAFKLDTLLKLADVKGTDGKTTLLHFVVQEIVRSEDAKSEKESAMITRSSKDEQLRKQGLKLVSGLSSELGNVKKAAMMDFDVLHGYVNKLETGLEKIKSVLQLERQCTQGQKFFSTMQSFLKKAEAEIEKVRGEEKRALMRVKDITEYFHGDTVKEEPHPLRIFMVVRDFLSTLDHVCKEDSKAEGSDKSQSHKTEFWKEQSAPAMPGLAAEADVALAFVMRHTFNGGRSKGWGNCGCGLEKLPTFKAKVSVGELMKVWRRRDLPLKSGAPLDFARHHTTFLGCSEYKPRQGSKTKRPRAKSVTSQ

SEQ ID NO: 70096 - protein, 184 aa, Zea Mays
MAPEIWQGKDYDAKSDLWSVGIILFQLVTGKLPFTGSNAFQLHQNVMATDDLNFPSEIEADLCPDCIDLCRRLLHRDPKKRISFEEIFNHKFLATTRKCYESCHAVELRDNCQTITSPVVLKTKSGSIESKNPKVFDSWEWIEREYVLVPENCTSMEMSSLNIKSTKDDMDTRTVSYGVSHCGL

SEQ ID NO: 70097 - protein, 661 aa, Zea Mays
MPELRSSTRQACLRSKKLEDLQLGEPPAKPVSPAPPRAGKRAPTRAARGRKGATGKGVPPAPTTRRKRGNIVDLEADPACEDPPKAVKGLEVAAAAAPKNLPLKEVAEVGVLKMNGVSAEKIIGAEDESTATPVPERVQVGNSPEYITDRKLGKGGFGQVYVGRRVSGGAARTGPDAYEVALKLEHRNSKGCNYGPPYEWQVYNTLNGCYGIPSVHYKGRQGDYYILVMDMLGPSLWDVWNSMGQAMTPNMAACIAVESISILEKLHSKGFVHGDVKPENFLLGQPGSPDDKKLYLIDLGLASKWKENNGHHVDYDQRPDIFRGTIRYASVHAHLGRTGSRRDDLESLAYTLIFLIRGRLPWQGYQGDTKSFLVCKKKMATSPEMLCCFCPAPFKQFLEIVTNMKFDEEPNYAKLISIFDGLIEAPASRPVRIDGALKVGQKRGRLHANLEDEQPKKKVRLGSPAAQWISVYNARRPMKQRYHYNVADSRLSQHIEKGNDDGLYVSCVASSANLWALIMDAGTGFCSQVYELSPVFLHKDWIMEQWEKSYYITAIAGSTNGSSLVVMSKGTPYTQQSYKVVELDFLYPSEGIHRRWESGYRITSTAATNDQAAFILSMPKRKPMDETQETLRTSAFPSSHVKEKWAKNLYIASICYGRTVC

SEQ ID NO: 70098 - protein, 540 aa, Zea Mays
MMPSGPPNPMGPGQPVSGAAASLLRTSSSLLSGGGQPGMAGGGGGGMLSSQSPFSSLVSPLTQFGGNGLLGGASNVSSLLNRTTFRNGGPMPGPGSMQGGGMQMSTLQQRAGLDGASDFISTGGSDPLSFPSSSQVNLVNQMGSDNLQVTSQQQQQMDAVQDMQQQQQLPMSYSQQQLPAQHSQQLQQPQATVKLENGGSMVSIKSEQQMGQPEQNGPAQMMRSAGCVKLEPQQLQAQMMRSLSSVKMEQQSSDSSAFLQQQQQQQQHHLLQLTKQIRNCPDLVSMGGPNTTANPQAAAAAAAQLTLLQQQRLLHMQQQHQQQQILKNLPLQRNQLQQQQQHQQQQQQQQLLRQQSLNMRTPGKSSPYEPGTCAKRLTHYMYHQQNRPQDNNIEYWRNFVNEYFAPNAKKRWCVSLYGSGRQTTGVFPQDVWHCEICNRKPGRGFETTVEVLPRLCQIKYASGTLEELLYIDMPHESQNTSGQIILDYTKAIQESVFEQLRVVREGHLRIVFNPDLKIASWEFCARRHEELIPRRSIIPQ

SEQ ID NO: 70099 - protein, 369 aa, Zea Mays
MSHLDAASLLAPSPPLAKPHPRSRFLCLISSMLAVLGASLAGLLLFALHPAPNPVPNYASLFLSLGSNDTAASHLRALTLHPHVAGTKANALTARYVFDALSALSFPTHITPYSVLLSYPVHRSLSLSAPGRGVVTSFSLKQETYPNDPYAAAAAETIPTFYAYSASGSVSAEAVYANYGREEDFSYLASRGVDVAGKVAFARYGRIHCEDIAHNARAAGAAAAVVYTDPLQYGGAPGEGWFPDSRWLPPSGVQVGSLFRGVGDPTTPMWASSEGCERVSLEEAMNTDDMPLIPALPVSAQDAMEIHRAMGGAVAPEDWQGREDGPVYRLGPGPAVLNLTYLGNDSMATIENVFAIIEGAEEPDRCHSW

SEQ ID NO: 70100 - protein, 300 aa, Zea Mays
MMTYVGKNWPMADAIKGSSERASNQSHRDVTRSRSGGPERWRGQTSGEVAEMNGRRPPPCSGTAPATAGRASEQSTRRSRDPRLAAAASLHTPRPPPIQQETPMAIIQPPSRQQVVVLKIAIDPRHGLPLLLSHSVEQPAAIPQQQAATPSGLPVHTFRVATDPRDGHIAILSHTVEATTRHHAAASSVAAADQPGGSGVMRAREARDGNSQTTTRMVFRTALKEFVTKQIAETRGQQASLTTEELRGFVVRKAVDNIMRSEKHIPGTQERIGKYLRFCRGKIRKLIQEYFHKYEGRFPR

SEQ ID NO: 70101 - protein, 188 aa, Zea Mays
MANDKDLLQVVRLLDDACKEAGFFYVKGHGIDESLMREVRNVTREFFQLPYEEKLKIKMTPQSGYRGYQRIGENITKGKPDMHEAIDCYTPIRPGKYGDLAKPMEGSNLWPKYPSNFEVLLENYIKLCRDISRKIMRGIALALGGAIDAFEGDTAGDPFWVLRLIGYPVDIPEEQRTDTGCGAHTDYG

SEQ ID NO: 70102 - protein, 389 aa, Zea Mays
MNAENKEGCSLQVLEGDIQEPIFLRGKSFSSINFWMNKGHLRSSTHYDPHHNLLCVVSGRKKVTLWPPSASPFLYPLPVYGEASNHSSVSVEEPDYSIYTRARYMKEYSETVILNCSDVVFIPEGWYHQVDSDDLTIAVNFWWKSRIMTQMLEHMDAYYLRRIMSRLVDQEMSIMAQKSPFGHLKDCTDIQHMAKTLTGFQLFNLQKDSPLRTLEPSTLQALYELISLVHDGAEAVSQMDKIEATSQNKSSNQRDDTDTSAAADDSSLLDKDPVAKIILPVEPLELRTMLLAMVHTFPRTLENLILNMLGVGAEILTRKFDEMDQQTTKEEQSEFYKIFYSVFDDQYAAMDALLNGKELFSFQIFQNVLDKYLGVHVDRPSRFVTRTNQ

SEQ ID NO: 70103 - protein, 299 aa, Zea Mays
MRRLLGGSLVLCIAAVVESKPPLDSLGIPPQDEAYYIGGVIKCRDGSGRFSRDQLNDDFCDCPDGTDEPGTSACPEAKFYCKNAGHTPVTIFSSRVNDGICDCCDGSDEYDSNVTCKNTCWEAGKVAREKLKKKIATYENGVVIRKQEVERAKEAFAKDEADLAKLKGEEKMLQGLVDKLKEQKKLIENAEEEERLRKEKEEKRTKEEDEKQAAVEKGALDASRDVDSKEIHDHLQEGENKHDGHATGHDNHVTESRASIEQHGSVSKDGISVEGGTVDELPQESAAPTIEKVQLIKIG

SEQ ID NO: 70104 - protein, 240 aa, Zea Mays
MSTRRRRARGTRPRPLGTQTTTSTSRPARSPGTRSTSRSRRARRPWSTIWARGRWRWCACRRRHAWTGSALCSPPGTMVVWDSPRQASPRSTCGRGRRRLEEMGVGIYYMTADSARPARRWISCIGLANTTAQSDNSSFDIVLAHFRSLYIFHQNSIRLLHLVNMSAHMLSADIPPVLKGRLPPSDRTWKATTDITFIFPRIHSSITPRPPDQNLIDRSTSAGNHSTLQHLDRNTKSVRH

SEQ ID NO: 70105 - protein, 657 aa, Zea Mays
MDRLQRRNPSSRTHATSLKHPRPPRVPTFQPQPASRSLQEPEPSSPEYKFFKKLCEQPGHSSLSYKHSHQSLESNVYRQKQGSRNVTAPKKLHVHDNTVYCDEPLATPAKNEEIPGEKISVQSSHSEYDDKDTPQVGPHDRLLGIHVLTPISHTSFDVTGISVNVDREPISGHIFSGKRSKLLKIAAKTMSMGSAELFQRRSEFIVGILQRLGTNNIMRKQEGSMSHRKMDCRHALAIPEGHFDNLIDYKRSNFNPLAKLRNGKIPSSYASDEACEFMALPSGYNQGPGSIVDQKNDLSHGGSGASECMALPWACVNDTLSSDRKGDIVHNQVSNLLLEDVDRYVHGRHASANELSLNGQTDSYGQHRWDPMLSVTFLKSFHDRLYFPCQNEERHAVPYGISNTSEQPELCSSIELCTCSSIGLEIEDPKEAGLCGNSDAGFPSWLAQLVGKPTISSIFDSGNEILDHNDFRCISNFHSNMFSSNSSCLNSMSTPEQSYKVGAKGLLDSSFGLSCLAGLEEYSTDAELPDDSDRFLQVLDQLPVKFISSGFSNNDSRIWDHRSSNAEPPFNQDWGTTQPWSSVHQLQPHSDSGTVLGFMPNGSAYSDLVERHHSLMLVQGNLSTDVLGATDLSFFGSCSSLDNITEAPTLSSDGITW

SEQ ID NO: 70106 - protein, 987 aa, Zea Mays
MHFTVFAAYHLILETSFFEDQRVFLNDSTTKETSATATEGTYGVAALSGPIPNFPSHDDSPALRLFHATSNSYADVNKPLISPRNVDKFSAVSSSSSNDLEQGANVRSNNAERLTLPVQGPLRKLFADMLCHQNIYLPVTSLQEANDNRKEVRVESSQETVSNGFHRPKTGESVISIENGESINDAQTQEITQAIMPTGSSVSDKDAESPVMGDNGAHSTTSIIIKEKHADGDQADDALDSHSILILMSSQCTEKQVICEQSHLTRIKYYGSFDVSLGRYLQDILQNQQKLSCSSCGEPPESHMYSYTHRNGNLTVLVKRLVPKHYLPGESEGKIWMWTRCSRCDHEHGVSKPTPRVLISAEARNLSFGKFLELSFSSHSAARRLSICGHLVNRDCLRFFGLGSKVAMFRYSPVEIYTTCKPQPTLQFVNPIRQDWFEGQRRNVHAKSMALFSGVARFLQNLKNEHPDAITLAVNCGLTLPVKDFTELEELLIKEKAQFESSLDKATDENGKPFGSVHGVLNINWYYQDLLLKLYIWDRRLYQLFYCKSVQLESCSNYKNPAGTVDGNCDDNFGVDKKIGEITSDEITAALGVSSTMESASNKLDHQSGDTTALLLHKSQEAGHSEFPCNGGSKAEESSIAHGQIKVDGTTETTNDPCFEISNDMEVQANLTVADPIPMEQERCSTPQQFKYPYWDDRERWIWNSFSESQMAYRDDIEIGYLGKFELINNYLPHYLSPLFEQHDDSYSPQFAVGPGSNILCIMEDEISSIIARALAISDERHHLIDLKFENGMDYSKGEYAKAIEKSFSFLSESSFSSSPWSSTDSEASLSSLSSFSSDDFSGYDSSSLLSPMHPEMTVNGKVTLKDKYSVTVVYDNQFFALRKKCCPSELAYITSLSRCKKWNAQGGKSKAYFAKTTDDRFIIKQIKKTEFESFIKFAPDYFKHVYHSLDTGSQTCLAKILGIYQVIISRARVGFVSFYCFLSHVD

SEQ ID NO: 70107 - protein, 436 aa, Zea Mays
MSAPMEISFSAPPPPPDAASTAAASPLLEPAAAQMLPPVAAVSSSQPMQQTAAAAAVVAPSPADDKVLVSVEVLLHATSVARHEDVQVAVERMLEARSLSYVDGPVPIPADNSFLLENVKRIRISDTDEWVENHKVLLFWQVKPVVHVFQLSEDGPGEEPSEDDTLSSFNEWALPAKEFDGLWESLLYEVGLKQRLLRYAASALLFTERGVDTCLVSWNRIVLLHGPPGTGKTSLCKALAQKLSIRFKSRYSMCQLIEVNAHSLFSKWFSESGKLVAKLFQKIQEMVEEESNLVFVLIDEVESLAAARQAAISGSEPSDSIRVVNALLTQMDKLKSWPNVIILTTSNITTAIDIAFVDRADIKAYVGPPTLQARYEILRSCIQELLRVGILTYPQGSSVPCILNYSTLNEKKHCPEAAEPHGFSTSLVKWWWFISL

SEQ ID NO: 70108 - protein, 153 aa, Zea Mays
MAGDAGSGVDWESLAEATSGAIGSLVSTTVLYPLDICKTKFQAELQTHQGAQKYRCKVMIQAADPDEDDDVDSERPSKSRTPKTMLGALHAIWSKEGIPGFFKGLNAQILKAVLSSALLLMIKEKISKFTWVSLLALRRYLFVSQKRIKSVTV

SEQ ID NO: 70109 - protein, 82 aa, Zea Mays
MMAQLSNIISSEYRLPCFMLYKKWSTSLYKIYHLLEILLTYIVGILLLDFCFLLIEQAKRNAKMKAEMNEKTMRKFPVSQKH

SEQ ID NO: 70110 - protein, 349 aa, Zea Mays
MAGVEEEGEVAALREALRQQVQAVEELRAELEEERQAAASGADEALAMILRLQAEKAAERMEAEQFHRVAKERIQYDEDTLAFLRAVVFHQEMEISSLNRRLLAVHATGDDPLSPAVDLPWLRKLAKSGVASRRNASLPAAHLEELCSELDVVVDTDADKKRVGDRRPARTVSDIGEVISREKEWATRPNQTAPTPRLYRSASHSHGLPRRATCCSAQCGVRSAGRASPEIIAEEDEKSCKSNAALEADIEQIKATVLSLHTDLTKLRESTLSMADAHSQILAEIHAKLDGVTPRRQTNFEPRSELLLKKATRGGSSNSSSSSKEQSYQYQWQADVLMNHFIEMDFNCC

SEQ ID NO: 70111 - protein, 55 aa, Zea Mays
MILVVLARAVHVDLIASSSIRQFVGYARRIKLVFRIRCMVELVLQRISLVFLTSS

SEQ ID NO: 70112 - protein, 429 aa, Zea Mays
MQSSSQHYVKSELLPCIGATNRAIRSTVGTVISVLFQIVRVAGWIELFQALHKCLESNDLDHMEGAMDAIYKICEDVPEELDVDVPGLSERPINVFMPRILQFFQSPHASLRKLSLGIINQYIVVMPSALYMSMDQYIQGLFNLAKDSSADVRKLVCSAWVQLIEVRPSILEPHLKNVTELILQANKDSDDEVALEACEFWSAYCDVSMPPEGLQEFLPHLIPTLLSNMVYADGDESLDDAEEDESFPDRDQDLKPRFHDSRLHGSETGDDDDDADAVNVWNLRKCSAAGLDVLSNVFGDSILPTLMPLIEQNLARTDDDSWKERETAVLCLGAIAEGCISGLYPHLPQIVAFLIPLLDDKFPLIRSITCWTLSRYSKFIVQSLDHPNGRGQFDKILMGVLRRILDTNKRVQEAACSAFAILEEEASEE

SEQ ID NO: 70113 - protein, 250 aa, Zea Mays
MEMNYMLAYGSAEASLRLLWRFGLLEHLLPFQAAYFSSTRFKRKDKGTNMLLVLFSKLDNFLAPNRPCHNSLWISLLAFHEALARKPCDPLIVATFALAFYLGGDMSLAVDIGKSINRQHDTGFRELLEPKVWTDKHLAGEVQSFAALMKQALTEMTDEYHVANAMAKIPQAPSSDLVFIPLQAYLKVLKFIECVQYGKKERGHEPKRDGMINYHNLSNGTHAEIRNLFTLVVFDTLYPTDTEDENDCSS

SEQ ID NO: 70114 - protein, 739 aa, Zea Mays
MGKEKLHKQPSGRLIESLKMERMRNILTHRYPYPHEHSRHFIIAVFACWLFFISSDNLQNLIMKLDKNFKWWSMYACLIGFFYFFSSPFIRKTIKPNYSNFNRWYIAWIFLAALYHLPSFQSMGLDLRMNLSLFLTIYISSLIFLMVFHIIFLGLWYLGFVSRMAEKKPEMLTIIQNCAVISIACCVFYSHCGNRTVSRDKSIDRRTASWIVFSLWTKHDDNTLISRLLRMHKFKEQICSSWFAPVGSASDYPLLSKWAIYGELSSNGSGSSNEISPVYSLWATFMGLYIANYVIERSTGWVLTHPLTISEYEKLKKQLKPDFEDMVPWYSGTSTDLFKTVFDLMISVTLFVGRFDMRMMQAAMNKTPDEANSHDLLYDHLDGKDELWFDFIADTGDGGNSTYAVARLLAQPLLVINSDDSRLTFPRGQLLLVGGDLAYPNPSSFSYERRFFCPFEYALQPPAWYKPEHIALEKPELPLGVSELRRYRGPQCFMIPGNHDWFDGLNTFIRYICHKSWVGGWFLPQKKSYFALKLPNGWWVFGLDQALHGDIDVYQFKFFAELCQQKVGESDSVIIITHEPNWLLDWYWGDSTGTNVAYLIREYLRGRCKLRMAGDLHHYMRHSCIESKEPVHVQHLLVNGCGGAFLHPTHVFENFRVFYGNKYETKSTYPSYHDSSKIALGNILKFRRKNWQFDVIGGFVYFVLVFSMFPQETCFAWFSSCRCSSYFGSATDATYGISY

SEQ ID NO: 70115 - protein, 732 aa, Zea Mays
MPANTDCSEDLFQSHEEMLENAEFWSKSNYSPVEHLECHMEVNMELNEGEQMIDHTEASRYELFSNDLQSQSRTSNLDNEHFPRDASNHANVEATGPPYDLSNGGISTEHSDWSEIKWGSTDEMLGNTGQDDDHFTPMGMFCLTNNTDILDLSCIESNMGERTESIRNGNSSCLTMQEEHLQAECGGYPHPDYISVDMIDERSLHDLPHGLSQNNEQYEMEQLPQNICESGSMQMASPDQYCSSPDQYCDDTSLSDFYMDVSSPESISCEQNQPEDIFFKSESSTDSSPVPSSRNSTTEDADKYLGQPSKQLLDSKIVPFSNQHTFKNMEYQKPLVLDKQYAYRSNNSSIHNSTKGCFSRDGDMVSDLCVLEGNRNPAPAHLWPYQGKFHHNFQQPVYGNSIIPAFGGTRYKPHDERTTLRLALQDISQPNSEANPPDGVLAVPLLRHQKIALSWMVKKETSISLCYGGILADDQGLGKTVSAISLILTERPPVPQSSTKNEPCEAVTLDEDDDCIGPHSEKLMRTCSSQVTSNTVKQENPIVAVKARPAAGTLVVCPTSVLRQWAGELKNKVTSKANLSFLIYHGSNRTKDPNELTKYDVVLTTYSIVSMEVPKQSNPDSDGEEKGKPDPYGAPVSSSGSKKRKASSSKKTKNKSVAESCLPEKPLAKVAWFRVILDEAQSIKNYRTQVARACWGLRAKRRWCLSGTPIQNAVEDLYSYFRFLRYNPLRCI

SEQ ID NO: 70116 - protein, 58 aa, Zea Mays
MSMRYLGTIYFCYVRFIIGVSSVVVSRLRTYGAAAKLRASCECAHRIVLLVGCWYQGL

SEQ ID NO: 70117 - protein, 474 aa, Zea Mays
MSAAFVHLHCKNYFKFTKDISSLSQRVLLSGPTGTDMYQEYLVKALAKYFGARLLTIDSSMLFGGQTSKESESYKKGDRVRYIGSGIILDGQSPPDFGSQGEIFLPFEENRSSKVGVRFDKKILGGNNLGGNCEVDHGLFCSVDSLCPDIPGWEVTFKHPFDVIVEFISEEIRHGPLILFLKDTEKICGNNDSYHGLKSKLKHFPAGAFIIGSQIQPDNRKEKANVSSPFLSKFRYSQAILGLTLQDIDGGNDNNKETSKAIMKHLIKLFPNKVTLEAPQAEMELSRWNQMLNRDIEVLKGNANISKIRSFLTRLGLECTDPEAILVTDRILTNECIDKIIGFALSHQLKNCTNPDPPLGSVQFALSSGSLKHGVDMLKSIQSGSKSSTKRKSLKDIATENEFEKSLLADVTPPHEIGVTFEDIGALESVKDTLKELVMLPLQRPELFNRGQLMKPCKGILLFGPPGTGKTNAG

SEQ ID NO: 70118 - protein, 84 aa, Zea Mays
MPTKKMILEFLKGRMGYVARNLAAIVGSAVASKPSRAAVLVVWEHWPKCPLVMCCTAASRCKKDKSVWILYCVSAVSYWLSRTN

SEQ ID NO: 70119 - protein, 470 aa, Zea Mays
MATGAGWAPGRPVERHGAPRGGNARSKSVVPGPRRPSPSPARSRPAADHSGSADLCRVRVAVRLRPKNSEDLAHGADFDSCVELQPESKRLKLKKNNWSCESYKFDEVFSESASQKRVYEAVAKPVVESVLEGYNGTVMAYGQTGTGKTYTVGRLGKDDPSERGIMVRALEHILSSLSFETDCVAISYLQLYLESVHDLLAPEKTNIPIVEDAKTGEVSLPGAAIVEVKDLEHVFQLLQIGEANRHAANTKMNTESSRSHAILIIHLQRNTRTKEENGSSLYDVRHDTFPDDLPLVLKSKLLIVDLAGSERIDKSGSEGHMIEEAKFINLSLTSLGKCINALAENSSHVPTRDSKLTRILRDSFGGTARTSLVVTIGPSARHYSETSSTIMFGQRAMKVVNTIKLKEEVDYEILYKKMEREVDQLTSEMERQQKVIRSEKMQMDKRLKESERSFHDLRMTFNMQIEGARI

SEQ ID NO: 70120 - protein, 156 aa, Zea Mays
MFSANCYVRDQVRRYVYHDVVRLGDLEKLIDCSCVQCQGDLPEAEAAVQAFQGLRQHLPHVRQDPPGALPLLLPLMQGGPRDDAGRGPVQHPAALRRRRWRWRWHGGPGPPRVPEVREPPRRRRLGPRRRRPGRHPRLHPRGPDQQRGRRVQRQRY

SEQ ID NO: 70121 - protein, 144 aa, Zea Mays
MYPKAADEGAQPLATGIPFSGGGGYYQAGGAMAAAFAVQAQAPVAAWSTGLCNCFDDCHNCCVTCVCPCITFGQTAEIIDRGSTSCGTSGALYALVMLLTGCQCVYSCFYRAKMRAQYGLQDGMRTWRGRGAPPPPCRRTCILG

SEQ ID NO: 70122 - protein, 137 aa, Zea Mays
MNMIPRIPMARRERTHGRPHNRQRRRVDPGRSGRETGRDGTGGRSAKSYVRIGQGRLSSERKRHGNGRSRVATAVTPCPATGGPVPRAQSPRRRLPIPGTAFLGQPACRLAWSEHSTAWRDRPRRPTRMNTPLRPHP

SEQ ID NO: 70123 - protein, 454 aa, Zea Mays
MRLCGNINVPFPFGIEEGCSANDNLRLNCTSNDTLILDRGYTQYRVTNLSLDDGLLMVTNMLNDTSSNNMERVVLVNYDGYNQNGFYSTDFYSTDEDVVDDIDECLIPNKCNGICHNVDGGFNCTSCPHGKEYDPKKKKCVMSAKQRILIFGIVIGLVCGLGSISFALGAIILTGKWKKGIQRRIRREYFKKNQGLLLEQLISNENATTKTKIFTLDELEEATNKFDATRVLGHGGHGTVYKGILSDQRVVAIKKSKIVEQIEIDQFINEVAILSQIIHRNVVKLFGCCLEDEVPLLVYEFISNGTLYDILHENIATKCLLSWDDRIRIATEASGALAYLHSAAAIPIFHRDVKSSNILLDDNFTVKVSDFGASRSLSLDETHVVTIVQGTFGYLDPEYYYTGSLTEKSDVYSFGVILVELLTRKKPIFINELGAKQNLSHYFIEGYRKGLSWK

SEQ ID NO: 70124 - protein, 350 aa, Zea Mays
MEPAAEDAAAAAPDSWETADIDGPMSRLILSARRVSSSPDFADDQDPPQPPPTLQPQGAPSAPSDAREDVVAQVDQFLREALEKPRERLSVLRMEQEILKFIHDPSRTEYEFNGLPTSYLRLAAHRLAQHYFLQSIAIPDNSLPDGTGSRIILRKTTFDCRLPAVRLADIPVNLPQEDISVAKVAIKQRPQKNLHGMNSSSAHSSRDNLQKSVEERKEEYNKARARIFNNSNSSTATDERSAEEVTLPSTLHRSTSLELNSSNRIGQGAEITLERSLTTTSASSRSNRSKIDKEPAVNRNKQNNRVAIFRDRESERKDPDYDRSYDSERVIGKGKDWDGPVCEQATGMWP

SEQ ID NO: 70125 - protein, 206 aa, Zea Mays
MLLVTSGGIAWHAFEVLQGVMSSAPDIIGNTLHAHHDHGSSGHHHGIDLEHPVLALSMTTLAISIKEGLYWITKRAGEKEGSGLMKANAWHHRADAISSVVALVGVGGSILGLPLLDPLAGLVVSGMILKAGIKTGYERGVRQPSGIILRRSSHAGRENPRTPAPPIHSGTVAHVRSDRDGTAGPGPGLRPVLWRGTAGEIFVTTP

SEQ ID NO: 70126 - protein, 337 aa, Zea Mays
MRLSIGQVHRNVLALASSRSCFVLGDRVSFRMLSQPRVAGFHQTAWRGSQILEDNRGGPLTLASLEVQSRVEYGKKGKMERTGGPKPSSRASSLYVKPKVSSNVKPAKSALMKPAGIKKTLKVDEALFSAKSFEELGLPPLLVDQLNKEGLTAPTEVQSAAIPIIAQKHDVVIQSYTGSGKTLAYLLPILSDIGPLKRTMEQDHSEKRSGIEAVIVAPSRELGMQIVREVEKILGPNDKRLVQQLVGGANRSRQEEALKKNKPIIVVGTPGRISEISAAEFWSMLEGDLEAHLGIFLAHLRDDLSVRLSWFLQQYHFQLYEQQGVGVMIQFSLELKV

SEQ ID NO: 70127 - protein, 334 aa, Zea Mays
MASWSWTSVHCSSYPLPGPSARFTPSLVSATTPALRRTRARGQLQRCLCSQYAGERQPPPPPPPQPEPDSPQQLERLFSNLNQTTMKHEPGSVTSAVFLVAGTTVGAGILAIPAVTQEAGFLASAVICILCWSYMVVTGLLVAEVNVNTMCELGSGGVSLVSMAMRTLGTFGVRTSCLSYLFIHYALLVAYVARSSNIITNSLGIPIWESATLFSLAFGGVCYFGSQRLIGAVNGVLVVGILASFTSLVVVASGNLQWSSLLEANFAAAPQSIPIIALSFVYQNVVPVLCTNLEGDLSKNSYCGGYCHTPGSVPSMGWSNLGDTSRPCREQHCF

SEQ ID NO: 70128 - protein, 404 aa, Zea Mays
MMQPPPPHQQQQWAMAPPPPPQYYQAGHPPPPPPQFYQAGPPPPAMWGQPPPQAAAAPAPAGGGAGDEARTLWIGDLQYWMDENYLYSCFSQAGEVISVKIIRNKQTGQPEGYGFIEFSNHAVAEQVLQNYNGQMMPNVNQPFKLNWATSGAGEKRGDDGSDYTIFVGDLASDVTDFILQDTFKSRYPSVKGAKVVFDRTTGRSKGYGFVKFADSDEQTRAMTEMNGQYCSSRAMRLGPASNKKNTGGPQPSSAIYQNTQGTDSDSDPNNTTVFVGGLDPSVTDELLKQTFSPYGELLYVKIPVGKRCGFVQYSNRASAEEAIRVLNGSQLGGQSIRLSWGRSPANKQPQQEQSQWSGGGYYGYPQGYDPYGYARPPQDPAMYAYAAYPGNDVPRVIICKLVAK

SEQ ID NO: 70129 - protein, 156 aa, Zea Mays
MASSRCFENPPVLEPASGGGEVVDDFGGQKAYVSGSAGSKAAVVLISDAFGFEAPNLRKIADKVASLGYFVVVPDFLHGDPYDPSNNAHSNPGTWIQSHNPQTAFEEAKPVIAAIKEKGVSSIGAAGYCWGGGCGTGESSRDPGCCVGTPFFTNCR

SEQ ID NO: 70130 - protein, 562 aa, Zea Mays
MGTSKCFLFMRILILTTMAISAAMNATIIGTLVTKRDYKFAELMRLPDTFLMLFVLLCFDFSIYLSFKILWSARTSVDQKICSQVLLESGHGYKVGNKRNPLTDHLLGELEDTTKTTGIGRDPVMDSECETTLQKQVMVFDQQDETFDIGETPLSKTSKDHLGQTVGKETPVSEALHVDTTDSLSFHDSLFLSKHGCIARNPILPYRQVSTPKFHSVKNMLDMIDYLAVEGFANGEVVRDDVSAALSQQVAELISIRCNEINNTVRFCNEYASSMKSKVQVVFPSHHQFADILDDFWGNLFDLHGNLTEKGNAIRLDLLIGLDVEEIKSCPCYFDVLPGGLCDPLKLNLGNMGLPPLFRIINNMCPEHGNCTLPAVVAFRRRIMDTFLTEDPSLLKDEKVSYFPMDNEVQYEVPIYKNLDMVAQSIGMGSPLEELNKMEVLVQKCPSQQVAHQASKTNVYFSYNELKGLLLNSFRVCILNISEIEKADWLFQNRGGYDEKLVGLAAEMVIFGDIHPSGVFCPNAVVGPDECLKCFLRQRNLCFLGSIVGFSIDFRAFWIQHS

SEQ ID NO: 70131 - protein, 92 aa, Zea Mays
MPGSEEVATGINSTHHLRCQHICRNLSQQHPMLSPRLISWLSRRWCCTSLPPSPLPSTACPVGRQHHRRPQRPPPLALLLSPMECQAMVAYL

SEQ ID NO: 70132 - protein, 180 aa, Zea Mays
MCGCAALVAGARPPRPVLPRRLRRRRGSSVRAEVSPGGESQPKKVTVAGAGWAGFAAAHHLIKQGYDVTLLAAESGPTEEVGLRGFWQPYRNIFALVDELGISPFTGWNKAAYYSTEGLAVEFPIFHNQPRLPAPFGVFAYPEFPNLPLSDRLTSIPVIAAVIDFDNTDTAWRKYDARKF

SEQ ID NO: 70133 - protein, 336 aa, Zea Mays
MAGGGAAYQSSSASPDWLNKGDNAWQMTSATLVGLQSMPGLVILYGSIVKKKWAINSAFMALYAFAAVWLCWVVWAYNMSFGDRLLPFWGKARPALGQRFLVAQSQLTATAVRYRDGSLEAEMLHPFYPAATMVYFQCVFASITVIILAGSLLGRMDIKAWMAFVPLWITFSYTVSAFSLWGGGFLFQWGVIDYSGGYVIHLSSGIAGLTAAYWVGPRSASDRERFPPNNILLVLAGAGLLWLGWTGFNGGDPYSANIDSSMAVLNTHICASTSLLMWTLLDVFFFGKPSVIGAVQGMITGLVCITPGAEDRRHPRRIPHPCGRWAPRRRHYWTLC

SEQ ID NO: 70134 - protein, 95 aa, Zea Mays
MAHVLVVRALGVEDVVQRALASTRPSSGARGGWSGGVYFFTRPLLPAFVGWLVRVASWCCRCRLCSSDEILGPLVGGDVEVGFPEQLLGGSRRLL

SEQ ID NO: 70135 - protein, 269 aa, Zea Mays
MGAVKHTLKMLSWLLLFAQLAAATTSKCTNATNGTETDSLGAMKLKLIAIASILTAGAAGVLVPVLGRSMAALHPDGDIFFAVKAFAAGVILATGMVHILPAAFDGLTSPCLYKGGSGGNIFPFAGLIAMSAAMATMVIDSLAAGYYRRSHFKKARPIDILEIHEQPGDEERSGHAQHVHVHTHATHGHSHGEVDVISSPEEASIADTIRHRVVSQVLELGILVHSVIIGVSLGASVRSSTIRPLVGALSFHQFFEGIGLGGCIVQDGG

SEQ ID NO: 70136 - protein, 303 aa, Zea Mays
MADVALLRSNQLPFLLLCPADAPPSIFLSAATLPWLCPFFHGELAPAPMLDVSSPSHPAPPSPWFPPSSDQVRSYMPSRVKQILPSFCKDMFRILDSLNFNSLIEDGSTMKLKIAKRCLIIFCALVTRHRKHTDNQMPHIVSCAIKISKNIHLSKLDSLPNRIVSLAFDVISRVLETGQDIEEWEEDTDEYMQKNLPSELDDISGWTEDLFTARKSAINLLGVIALSKGPPVASAASKRKKGDKNKGKSEMSSIGELLVIPFLSKFPIPSHGEDASSVAVQNYFGVLMAYGGLQDEPDSPIIF

SEQ ID NO: 70137 - protein, 50 aa, Zea Mays
MMSWFDGGGGLPFPLSARDGTRIGLSDSHTWIVGRVGCTHEPYTGSREGC

SEQ ID NO: 70138 - protein, 320 aa, Zea Mays
MKYRDMVVDYIVKHREEFEPFIEDEVPFEEYCNSMLKDGTWAGHMELQAASLLTRRNICIHMLNSPRWYINNFSGREATNMVHLSYHHGEHYNSVRLREDPCQGPAMPVVIKLQTDSNISNTNNNAQTKAKEVKKSSHRSTYDDTSVKLVMAGTGCSDIAIAEHVLGEMDGDVDAAIEYLIAERLAVSTDDAEVDLYINHAFNGDEPTKRQEDNNMIEHKDEANCSNEDETVEKPKHSNAVHSKKEKSKTNGCCSCGSARKHKASCSLATASSSREPPRAKGGQGKGQRGKKQKKKEQAEAAAAKAKESAIVPDLGALCI

SEQ ID NO: 70139 - protein, 75 aa, Zea Mays
MAGGRAQWQGRGTGMVLGRRISDGRLGLDTIYLNRNCPIRDRMAGLDVACVRGREFAGDEERGRSGDPRETRMAR

SEQ ID NO: 70140 - protein, 72 aa, Zea Mays
MFVNMVVVLPIIFCSYAFTNFYICSYPFQLAQLPQSPLLAQVVVFLASTAADLLQRSWRRLCAHKIGCDASI

SEQ ID NO: 70141 - protein, 593 aa, Zea Mays
MGRDAEKTSPPVPSSELEQEEDDDCYLSDQEDDALEESVLHVLEDEHLEDCHWSASCVITKESLLAAQKEDLRKVMELLGLREHHARTLLIHYRWDVERIFELLDQKGRDSLFSEAGIPLQYTNNAGPTSSAEVTCNVCYDDVPPSCALEMDCGHSYCSDCWTEYFIVKINEGQSRRVRCMAPKCNAICDEAIIRKLVIARHPDIAERFERFLLESYIEDNDTVKWCPSTPHCGNAIRVKGDIYCEVECTCGCQFCFNCSLQTHSPCSCMMWELWIKKCHDESETVNWITVNTKPCPKCHKPVEKNGGCNLVACICGQAFCWLCGGATGRDHTWSSISGHSCGRFTNDQTKKTEQARRDLYRYMHYHNRYKAHTDSLKQEAKLKNEIQGKISISENKESKIKDYSWVINGLNRLFRSRRVLSYSYPFAFYMFGDEIFKDEMTPQERELKQNLFEDQQQQLEFNVERLSGFLEKDFQLFTDDEVMDTMKHVINLSNVVDRLCKQIALRMICYILYAHLTISLHTNLRALTGPQSSILAGILLNKVHSQQNIVRRMNTGTNQHRLVWGNELMSCMARVLVIGGIIGGTDLTSETG

SEQ ID NO: 70142 - protein, 255 aa, Zea Mays
MRGVIVEETAEQHFLKHNDAGSWIQDSAVMLSVSKEVPWYLDDGTGRVYVVGARSAAGLILTVASEVFEESGRTLVRGTLDYLQGLKMLGVKRTERVLPTGTSLTVVGERPHKGPFYASSKSIDQLIVNLGKWAKLYRIASMGFATFGVFLLAKRALQHFLERRRRHELQKRVLNAAAQRQAREAEGSKGTSDAEPNSKKDQLVLDICVICLEQEYNAVFVPCGHMCCCVACSSHLTNCPLCRRRIDQAVRTFRH

SEQ ID NO: 70143 - protein, 125 aa, Zea Mays
MAPNHNFVDPERIEHGSPLRLPGHPVNGQPMDLEGWSGIQTEASQHMGVLQASSMGWNGAPVLAATPVVKKVMRLDVPVDKYPNYNFVGRLLGPRGNSLKRVEASTQCRVYIRGRGSVKDSVKTS

SEQ ID NO: 70144 - protein, 382 aa, Zea Mays
MDSENEKLRKALATLLRVVQKRSCDIVDVVKSAFQPFNSPLVDELNRALVEIDDLAKDLEDVAVQTQWEVENMANSQVKEHPHQEEAVEDLLIQDGSEDDLLIDEESPINYEDLVGYDDGRDYSTDDTYPMGSDWNQVMSQYGSFLSQIDEQPIGTQHSEFPVDGQPEGSRTPAVTKKPTQRTKLANFTAEEDTRVCHAWLAVSCDPIINTGQKRQGFWSRITQAYNSRRGTLPERSTKSLMSRWDTIKTHCSTFAGYMMAVLRQNPSGLSDADKTSLAASRFAAIEKKPFHFLHCWAILKDQPKWMDNHMGQQHQQANANPTHSNTVDLDAEESVPSSFTSKRPLGRDSSKEKAKRTKSVDTSSSDSEFMTRMGDLSLERP

SEQ ID NO: 70145 - protein, 84 aa, Zea Mays
MWDVISNDIACNVARQCLEDGNPPPADPTAGGGGGAPAAGVVVVAAREAEPRCLRAASLLARLAIGRETQDNVSIVVVDLKHRD

SEQ ID NO: 70146 - protein, 360 aa, Zea Mays
MKRKHGRKPADKKADPSESTSPESASSSSTEASDSPRNQAEEDNPPLVDAGAAVPEPPSPPPAQPSEPPRKPSATAPANPPADITYSRPKVGAVYGRVKLKFKSSKTVDSPLRPQQQDSLEAQVLPADAGASESAAVPEVVKGADAEKATVVMDGQQAEGQGLESSDADKEKVSRKVGGIKIKLAGLPSVESNTPDRKSDSTDERPPSKREALLGSKKMEDAVELRSSQESEEKQSTPEHQRNEKELAAALEAIKKVMKMDAADPFNVPVDPVALEIPDYFDVIETPMDFGTICQNLERGDKYMNSEDVYKDVQFIWDNCTKYNSKGDYIIELMKRVKKGFMKYWLAAGLYSDVLDSDIM

SEQ ID NO: 70147 - protein, 52 aa, Zea Mays
MLLIPQYLFLISTARVSSHTFIDQQVVENNVHELTYGGDHVKCKAYQRGWLK

SEQ ID NO: 70148 - protein, 273 aa, Zea Mays
MATASLALSLRLAPSSRPLSLRRRGAAGVTCRATTATFHQLDAVAVREEESRFRTAAAEGRNLLPLTRCIFSDHLTPVLAYRCLVKEDERDAPSFLFESVEQGSEGTNVGRYSVVGAQPSMEVVAKANHVTVMDHEMKSRREHFVPDPMRIPRTIMEQWNPQIADSLPDAFCGGWVGFFSYDTVRYVETKKLPFSKAPHDDRNLPDIHLGLYSDVIVFDHVEKKTHVIHWVRTDCYRSVDEAYEDGRNRLEALLSRLHCLNPNTFFWFYKTQC

SEQ ID NO: 70149 - protein, 377 aa, Zea Mays
MRRGATKDDAAPDKVMGPLFPRLHVNDTLKGGPRAPPRNKMALYEQFSVPSHRYSAAVPPAPSPAPPWGAQRPASAVPSTSASQVGGGDRPIFPLFRVPSTEPVRSSDQTNANSNGQGANGTIAESGRQRQSTHLKSKDTNAAGPPAEGNNSVGKKLANDDDFTVPSVLYSGMPPHSSQEKLTLFPTTSPCKSVPAKYSSTDKRRLEGMDASDVKSKGPSGIKEKEPVQVRIDLEDKETTPSFQVLNDKTWSPDPKLSSHMDRLKKQHAEAESYQIRTRNENAVETQSPPKNGVSLLSKPYVDRREQNGDSDLLGHGLRETGVKRKRSHHDVEQNDDLSDSSVESLPGMEISPDDVVSAIGPKHFWKARRAIVKCRS

SEQ ID NO: 70150 - protein, 959 aa, Zea Mays
MTRQAMQLFNETKNIKSSMSSLGGGSPEEVERFWSACVMYCVSRLSKARRSKESGSVSLCQILRASKLNIVDFFKEMPQFCIKVAHILTGLYGSDWEKRLELKELQANVVHLSLLSRHYKRAYQELFLPNDGKCSDSSSESNNQEVSDYYRFGWLLFLVLRIQTFSRFKDLVTSTNELVSVLAVLIIHIPVRLRNFDIKDSSYFGKKSDRGVSLIASLCEKYHTSEDELSKALEKTNTLILDILKKKPWTATSACQQDNLTFIDPEGLTVFKDLLQGGSLKSSLLILEKEYENAINTRGELDERMFANDEDSLLGSGSLSGGAINLPGTKRKYDVMASPAKSISSPNPMSPPRFCLSPKGNSFCNSKMAPITPVSTAMTTAKWLRSTVSPLPSKPSGELLRFFSACDKDVTDDIVHRAGIILGAIFTSSSFGEQICTNMRSANRMDAIWTEQRKMEALKLYYRVLESMCRAESQILSGNNLTLLLSNERFHRCMIACSAELVLATHKTVTLMFPAVLEKTGITAFDLSKVIEGFVRHEDTLPRELKRHLNSLEERLLESMSWEKGSSMYNSLIVARPVLSIEINRLGLLAEPMPSLDAIAAHHNISMGGLPPLPFQKQERLQDKDEIRSPKRACTERRHVPVDSNSFRSQVKDSIKLKLPPPLQSAFASPTRPNPAAGGETCAETGIAVFFSKISKLAAIRIRSLCERLQLSQQVLERVYSLVQQILSQQTGLFFNRHIDQIILCSIYGVAKISQLQLSFKEIVFGYRKQPQCKPQVFRSVYVHWPPTSHNGKTGEDHVDIITFYNEVFIPAVKPLLVEVGPGASPKRKEEGKGPYPESPRLARFPNLPDMSPKKVSATHNVYVSPLRSSKMDTLLSPSPKSYYACVGESTYAFQSPSKDLKAINNRLNSWKKVSGRLNFDIVSDLVVASSLNGVQNAKPAATEVVPTKTPVKCEPSES

SEQ ID NO: 70151 - protein, 358 aa, Zea Mays
MCKFFIMLTIVEHHELMLCVFVQPRLFVGRGMHESAFSLFMYTMFWIALLLIKFAFSYYVEIKPLVEPTKVIMKTPIHTFRWHEFFPREKSNIGVVIAIWAPIILVYFMDTQIWYTIFSTLLGGIYGAFQRLGEIRTLGMLRSRFDSIPLAFNSCLIPVETSDAKRKKGLRSYLHNRFKEMEHADKENIAARFAQMWNEIVTSFRDEDLIDNREKELLLVPYVSDRTLGVVQWPPFLLASKIPIAVDMAKDSNGKDRDLRKRLDNDYYFKCAIEECYASFKNIINGLVQGEPEKRVINKIFVEVEKCISEDKVIADLNMRALPDLYFKFVELVNYLEKNDHPNLPRNYMRPRYAGQYH

SEQ ID NO: 70152 - protein, 618 aa, Zea Mays
MNQSAENLFGYPASEALGQDALMLLVDSGDHNVVNDIFRRISMGESWTGKFPVKSKQGDRFSAVATNTPFYDEDGSLVGIICVSSDSRHLEQIFCKPPTSARPQSESSRTSCDGSCSNTSRRINLLNRSPFDPQIPLQSTFASRITNLATKVTNKVRSRVSTDDYGIEREGGSGESHCSDRGAKEEPTSSGTNTPRGNAPHGPFSTDENSPGKSTNPSSDELEGKVGLHKFLSSKAEALLNKKGISWPWKVRENDGPDERNHVILLHGDQENVMNHQKVSDSSIAPDSQGAEHNLPSKNEASGSWSSYNNNSTSSASSTGSTNSSALYKVDHEADCLDYEILWEDLVIGEQIGQGSCGTVYHALWYGSDVAVKVFSRQEYSEDVILSFRQEVSLMKKLRHPNILLFMGAVTSPQRLCIVTEFLPRGSLFRLLQRSATKLGVRRHVHMALDIARGMNYLHHSSPPIIHRDLKSSNLLVDKNWTVKVADFGLSRLKRETFLTTKTGKGTPQWMAPEVLRNEPSDEKSDVYSYGVILWELVTQKIPWENLNSMQVIGAVGFMNQRLDIPSEVDPQWRSIILNCWESDPQQRPSFQELLERLRELQRRYAIQQRNAKNSVEE

SEQ ID NO: 70153 - protein, 265 aa, Zea Mays
MGRAAPSSSPSSPQLGRKRTAAPTPEPPTPQRHCSMVDVMRRSRAVAAPPPVARARVYTYYETLLCETCGLGDRDDEMLLCDRCDRGCHTFCLRPIAAKVPIGPWFCPVCAPPTMAPKSFPVKQTKIVDFFRIQKDEQDAQAAKCRLSQDGRRRRKRSLVMHKRRRRILPFVPSEDGARRLKQMASLATALTSSKTKFSNELTYMPNMAPRSSNLARLEVGGMQVLPKEDKENIELCRTMQQRGECPPLLVVFDPLEGLTVILRI

SEQ ID NO: 70154 - protein, 141 aa, Zea Mays
MRGKGPRASLTGLLWTYHGKFGWKSMAPRSRYQRTRKACLSRTSRATWEGLTCGKTRVRIPKILTRSRSMTRCSKWSALQEHGIWEHSRLDFLGRGGSRKASRSRYRCLPLSPFKSTVSLGSSSPARSRYLITGFYVEESS

SEQ ID NO: 70155 - protein, 693 aa, Zea Mays
MHCRPCPSQLSLVFLLLLSLAPIISALPFPEPALPMACSGLRLSLPAAVLALLLLPSALASEPLNPEVQALIAIRQGLVDPHGVLRSWDQDSVDPCSWAMITCSPQNLVIGLGVPSQGLSGTLSGRIANLTHLEQVLLQNNNITGRLPPELGALPRLQTLDLSNNRFSGRVPNTLGRITTLRYLRLNNNSLSGPFPASLAKIPQLSFLDLSFNNLTGPVPLFPTRTFNVVGNPMICGSNAGAGECAAALPPVTVPFPLESTPGGSRTGTGAAAAGRSKAAGARLPIGVGTSLGASSLVLFAVSCFLWRRKRRHTGGRPSSVLGIIHERGGCDLEDGGGGGVVAAAARLGNVRQFGLRELQAATDGFSAKNILGKGGFGNVYRGRLADGTTVAVKRLKDPSASGEAQFRTEVEMISLAVHRHLLRLVGFCAASGERLLVYPYMPNGSVASRLRGKPALDWATRKRIAVGAARGLLYLHEQCDPKIIHRDVKAANVLLDEHHEAVVGDLGLAKLLDHGDSHVTTAVRGTVGHIAPEYLSTGQSSEKTDVFGFGILLLELVTGQRALQLGKASGALHSQKGVMLDWDLGPHYDRIEVAEMVQVALLCTQFQPSHRPKMSEVVRMLEGDGLAEKWEATNRPGVAAGAPCHDALGYDHRNDSNGSVFFNDFHDNDSSLSSDEARSIDMVEEMELSGPR

SEQ ID NO: 70156 - protein, 388 aa, Zea Mays
MELKLTWEEAQELLRPAPTAKPTVVMIEDYEFEEYDEPPVFAKRSIFTIRATGEQDQWIQCDDCSKWRRLPLNVIVAPKWTCTDNSWDSKCCSCSAPEELTPRELQSVLQQYEEMRRRKGSYGLKLNVAEMDASSLDAFATAAVFGEVGNQGSASVATTTKHPRHRPGCTCIVCIQPPSGKGPKHSPACTCNVCMTVRRRFKTLMMRKKQRQSEREEAEAGKKIAWVNRDEPEGSSLSRSPQTLDSTRDNSDVTATMLDKVSDVNKQGHIDVDLNLHPAAPAVQAAQQQPRPVSMMGLLEVAGRPLDNYMKQNGLTSLVGEQGGGSSSTATVPPPALVESEERTSNEGLVPSASAEREPNAMAVDEAGENQQDKAADDDDDAVAAAAT

SEQ ID NO: 70157 - protein, 444 aa, Zea Mays
MSKSRYIKVFGVDLSPDNVAVAIVYFVQGVLGLSRLAVSFYLKDNLHLEPAETAVISGFSALPWLVKPLYGFISDSIPLFGYRRRSYLFLSGILGALSWSLMAAVVDDKYSAALSIILGSLAVAISDVVVDSMVVERARGESQSTSGSLQSLCWGSSAFGGVVSAYFSGSLVDTYGVRFVFGVTALLPLMTSAVAVLVNEERLPLGKSSVSLSVSGSELIESSKQRIMQIWDSVKQPSILLPTLFIFLWQATPQSDSAMFFFITNKLGFTPEFLGRVTLVTSVASLLGIGVYNLFLKEVPLRKIFLVTTVLGSALGMTQVLLVTGLNRKLGISDEWFSIGDSLIITVLGQASFMPVLVLAAKLCPVGAEATLFATLMSISNAGGVAGGLVGAGLTQLLGVSRDNFENLALLIAICNLSSLLPLPLLGLLPDESRNADGAQTKND

SEQ ID NO: 70158 - protein, 310 aa, Zea Mays
MPSGSATQFRYTQTPSKVLHLRNMPWECTEEELVELCKPFGRVVNTMCNVGANRNQAFVEFADQNQAISMVSYYASSSEPAQVRGKTVYIQYSNRQEITNNKGTGDSSGNVLLVTFEGVQPNDVTIEVIHLVFSAFGFVHKIATFEKAAGFQYTDAPTALEAKNSLDGRSIPKYLLPEHISACHMRITFSAHKDLNIKFQSHRSRDYTNPYLPVNQTAIEGIVQPTVGPDGKIKEPESNVLLASIENMQYAVTVDVLHTVFSAFGAVQKIAMFEKNGGMQALIQYPDITTAAVAKQALEGHCIYDGGYCS

SEQ ID NO: 70159 - protein, 176 aa, Zea Mays
MENVAANPSAAAAAAGNGVQASGAGGERPEDASKQNLAQVTSSIQKTLGLLHQLNLTVSSFNSASQLPLLQRLNALVAELDTMQKLAEGCNIQVPMEVVNLIDDGKNPDEFTRDVLNSCIAKNQITKGKTDAFKSLRKHLLEELEQAFPEDVEAYREIRATSAADVSASAYDPPAG

SEQ ID NO: 70160 - protein, 185 aa, Zea Mays
MRIRTSVHTAAFCQPRPATRSRPTPQPAAALATARIRGFHPEISVAIASRNRHNPPNLALPCALRPPHFTQPISAPCAVFVREVGADDGGGGADSDFCGGQVGDTGDARRGASGGSRVPRLAARVRGPPRVLGLLPLRAVERAVEPGTPQPQPEQPCEIGARTIALFAMEPPALVLDVQNNVSVK

SEQ ID NO: 70161 - protein, 84 aa, Zea Mays
MIKLILDCVNLVRQVPEQEPVKVGPSGGRALLVVFMKTMSWNLVLGQWCPQDDSMSICTSGECMCPFPMEHQVLPCLGAQPTID

SEQ ID NO: 70162 - protein, 544 aa, Zea Mays
MRIRRYAARLLSATTAAPSSPPRPPAASWLHTDDDDDCCAFCELSRPAPQEGQDAVKHKGHIAGRVPESDVRADERVGLHQRPPAPEVKKCKIDHVPPVDKSSVGLQVVKCASEVSGAVAKPEGGTPASEAAAGPAAKAGAFVVNDAASEQGVQCIASPLGGASKLEEVTAGNSFANGPTTELGVFKGASLANELADVPGVTSIMPEVIGKPSTDPGAITTVVEVSDIGSVVHETTELESAGEDYIASEAAAEPEDAGRASCNTDDTAALDEPLPPSCDPNIGNAQVGNAMDTVASTVRPSRCDAAEEGASVNSTANGPVRARGPTVKGGVPKDKSVAPSVLRVLDVVTRSIGKSGRTDVICYARRTGKRKPELQEVKTENIDLEDGVLCEKEEALLRTDCCESVLSTAGSIDVKLADIKKDLMDNSAASKVTKMKRNIFECKIDYCHMTFKTKAELAAHKKNMCTVNSCSKHFRSHSYLRRHESAHNDDMPYKCPWDGCNMAFKWSWDRAEHFKVHAGAKPYKCMTPLVVAAAAAAAFLSAAA

SEQ ID NO: 70163 - protein, 134 aa, Zea Mays
MEACHLLNILSKELLGDFEPCAKLFIPMLFKLVVITVLVIAESADTCIKTILQNCKVGRILPRIVDTTKNDRSAILRARCCEYALLILEYWADASGIQRSADLYEDMIKCYTVVNAMSFSSIGVIFSLSHISLF

SEQ ID NO: 70164 - protein, 112 aa, Zea Mays
MQAVLQPFRIRSSDIMGRCSAIEHETLPAQVLQPVHLQLPLVCGELPEPACLQWLPGVECLERGCPCLVSWPMGGQNVFRSVVLTCPTRDMHRHLNGWLVFPARDGSVLCSF

SEQ ID NO: 70165 - protein, 743 aa, Zea Mays
MAKFYLKFDTMKLIVKASGYCSLEDLLHVICHSAEITWIQLRRNDKKILNDINADKDGRLLFHIVMKNGKRKKRVQTREEKIFLLANDCLTGDSLIHDLSLNQETNAICSNGCRIAKCMREYFIYKKNYRSAINSMILANSLHQKLWESSPFLLKQLPGIGIVTAKALKTAGVYSFETLATADARKIELATGRNYPFGNHIKESMSSLPPKIDIHIEETGNRLGKSTITVTLTRLSQAVKSSKRNCADMVVASEEDNVILFHENISPYSVKVFVPCPQNARVTLKVDLIFEEYVGLDVHKKHVVSREDGLYVTKEHGIDNLEPTYNIPSEICLVSSRTTRTSRSQSHTEQNPLSKEVYVIEDDGAAVSAVSALEKADDAVGTIKFNNLASLEVPSFDLLPEEEYGAPGPAEAECKGATDSTIFDHIRKKSKDFPTLMLSKSMDCSYEPLILKKMKISRDQFGVKHGCLHAGEATTMDFDPVEPRVSPTNTAEKFRGILGRSSERSRMLFGKMDSPFEKSEMLGTTPAESSLRFAGGKDSSLEKNKTLIRTPAENSLQIAARGKESKVSKVLTNLDKSPLGFAGGKESKMSNVPSTSAENSLQFAARRVRSSEKSKMLTTPYESSQAFLGEKDSPSEKSKILINSPVEYPFKKGSPGENPFKTCSPVENSLKFAAQRDSPSEKRKSCISNPLPPFQQAVQCTKQVGVAGQPFDIKEYCKEILRSRNDSQGGDPFAGYKSIFSFL

SEQ ID NO: 70166 - protein, 1243 aa, Zea Mays
MASAPFPPVAASAASAPPRLAPRHPFAAAAAARRSSLSFRPAARRPVLPLRSSAVAANTLRCTHRRAVSSRSRRRAQELGAAPALAASTWGVGEEKGGCLSCFPKSRRGRSGLARFAPCALPHASGLSFRSRLSGSKVKPSHILHAAGPDEPHVASPTWSDTSLDTRDMDHAISKEELEDVLNTPLPEHPKLIRGQLKNGLRYLILPNKVPANRFEAHMEVHVGSIDEEEDEQGIAHMIEHVAFLGSKKREKLLGTGARSNAYTDFHHTVFHIHSPTKTKEYGEDLLPSVLDALNEIAFHPKFSSSRVEKERRAILSELQMMNTIEYRVDCQLLQHLHSENKLSNRFPIGLEEQIQKWDPEKIRRFHERWYYPANATLYLVGEIDDIPRAVREIEAVFEHTLSENEGNPVPSTSPFGAMASLFAPKLPSGFTTNLTGEKSPATDKIKPVKRERQAVRPPVEHKWSLPEVAQDAKPPAIFQHELIQSFSINMFCKIPVSKVQTYKDLRSVLMKRIFLSALHFRINTRYKSSNPPFTSVELDHSDSGREGCTVTTLTVTAEPQNWRSAIKVAVHEVRRLKEFGVTMGEMTRYMDALIKDSEQLAMMIDSVPSVDNLDFIMESDALGHTVMDQLQGHESLLAVAETVTLEEVNTVGAEVLEFISDFGKPNAPLPAAIVACVPKKVHVDDIGETEFEIYPEEITEAIKAGLEEPIYPEPELEVPKELITQSKLDELKLQHNPSFVPLTKEENAVKVFDSETGISQRRLSNGISINYKITQNEARVGVMRLIVGGGRATEDSESKGSVIVGVRSLSEGGCVGNFSREQVELFCVNNLINCSLESNEEFIFMEFRFALRDNGMRAAFQLLHMVLEHNVWLEDAFDRAIQLYLSYYRSIPKSLERSTAHKLMLAMLNHDERFVEPSPHSLQKLTLQSVKDAVMNQFVGSNMEVSIVGDFTEEEVESCVLDYLGTVRASSSPTIEERIEKISFRPFPSDVHFQQVYIKDTDERACAYIAGPAPNRWGFATEGNDLFNVIQRSDADGKRHINVRSHPLFFGITLSLLAEIINSRLFTTVRDSMGLTYDVSFELNLFDKLDLGWYVIAVTSTPSKVHKAVDACKGVLRGLHSSRIVERELDRAKRTLLMKHEAETKTNAYWLGLLAHLQSSSVPRKDVSCIKELTTLYENATIEDLYIAYEHLKVDDSSLFACIGIAGAESGEDTNDDEPDVDLHGMGPMGGRGLSTMTRPTT

SEQ ID NO: 70167 - protein, 108 aa, Zea Mays
MALGSRRPCSVFSMAPGQGSQPSRPPLSFLSSQPALSISSPSSFFFLPMATRPWFSLRTAVALLCSSGAQVPTGAQLQLRLVHATRARLPLCISLLARAQRSSIPAAR

SEQ ID NO: 70168 - protein, 295 aa, Zea Mays
MAPKRRGNEMGVKELDSLMTLIAEKKRQMEQQESETNMQILLVFLHCLRKQKLEELNEIQTDLQYIKEDISSVERHRAELYRTKERYSMKLRMLLDEPTAQKMWPSPIDKASCRFLPNSRTPLSGSCPGTLQNKKLDLKAQVSHQGFQRRDALTSSDPPNSPIQSGNVIARKRRVQAQFNELQEYYLQRRRTGAQARRQEERDIVAMNREGYHAGLQDFQSVLTTFTRYSRLRVIAELRHGDLFHSANIVSSIEFDRDDELFATAGVSKRIKVFEFSTMCIAQLLKWLPDLNLAA

SEQ ID NO: 70169 - protein, 136 aa, Zea Mays
MAGKEMTPNSKAAAPPATIRLVNFISEDQLDEVKRTRGERVEDGTAQRDKPLFQILQENKEKKDAEFNERFKHRPPKALDEDETEFLDKLALSRKEYEQQVANEEAEQLRGFHEAVAARSTVVHELETPTVSRPET

SEQ ID NO: 70170 - protein, 252 aa, Zea Mays
MDHSIQPFRQRLCARKIGFQWRQLYLHSRRHRLRTPLPDPDNHPAQIRIHLVHQDRGYRISQPPRMLRAAIPTEVRPAPRRGLHPLPREFLEKLIRLPDLTASAYDLMSESKGRDGEEGRRWSARRKQTRSGSGGKDATRREAVGSESGRWRRLRGSGGKRVEALRRAARCAWWTWLLHASAVACRVEAEAAAVFFRPPPVGVLPPAPAPAVEGKEKVNGSWIWRARDRTPSAARRCPDPFRFATLRVRSGY

SEQ ID NO: 70171 - protein, 120 aa, Zea Mays
MGREVPGNALMFGVYEATKQYLAGGPDTSGLGRGSQVLAGGLAGAAFWLSVYPTDVVKSVIQVDDYKKPKYSGSLDALRKIVAADGVKGLYKGFGPAMARSVPANAATFVAYEITRSALG

SEQ ID NO: 70172 - protein, 59 aa, Zea Mays
MFIAQQGLGNIVHECNTPGSTNNPVCYCTTLPTSIYKISAASPLQDCIKEGATEYKHIS

SEQ ID NO: 70173 - protein, 261 aa, Zea Mays
MSLTTKMNVSSLHITFPSEGEFSKLKDSGLLQRIGLQYHWRNRNYKSFDEFLMDLKQPKRKNIRQERKKIPAQNLQMKRLRGDEIKSRHWDTFYKFYRNTTDNHWGRPYLTRDFFHLLGEKMGDNVMLIVAEKDDKLVAGALNLIGGDTLFGRLWGCLPDAYFPNLHFEACYYQAIEAAIELNLSKVEAGAQGEHKIQRGYLPVTTYSCHYFSNPGFAAAIGNYLTHETAQVKHAIKVLRDSGPYKEDILKEFAAQQDDDL

SEQ ID NO: 70174 - protein, 224 aa, Zea Mays
MLPCFHAERKEVSRHDNATIQRNALESVSSYEGSMSSEKVPPTPHRIPPSPSRFAPSPQIARVGSVNLSIQQILRATQNFSPSFKLGEGGFGMVYRAVLPDGNVVAVKRAKKDQFAGPRDEFSNEVDLLAKIDHRNLVRLLGFTDKGNERIIITEYVPNGTLREHLDGQHGRVLDFNQRLEIAIDVAHALTYLHLYADFQKIQRRQHERDTGPIAGRSRGRRGA

SEQ ID NO: 70175 - protein, 161 aa, Zea Mays
MVLDLSYNPLARAAEKGLTEAIKCLLEAGANPNVPDTDDEIVNKKKSELKRQGADAFSKEDYLNASVFYTQALKVDQFDATLFSNRSLCWLRLGDGKKALLDAIECKHLRPNWGKAYYRQGAALMSLEDYSSAYDAFSHGLELDPESEEMEKMLWEAMDLK

SEQ ID NO: 70176 - protein, 103 aa, Zea Mays
MVLWVFGYGSLIWNLGFDFDDKILGFIKGYNRTFNLACIDHRGTTEHPARTCTLETDGEATTRPYAMVQAYKEKVYPKNKVCLVHANPHLLPLLPSQVNKMEL

SEQ ID NO: 70177 - protein, 542 aa, Zea Mays
MAATSPTPTLAKPAAAAHARAPSAGPRRVSLTSCRCHRRRSTPSRWRSLPRCSRRGGKPVVTEVIDAAAPDKGPETGSKGEEEKEAVAGRGAPGWLRLDGVAADILAIAAPAVLALAADPITALVDTAFVGHIGSAQLAAVGASTSIFNLVSKLFNVPLLNVTTSFVAEQQAKDGNSNTGGERDEFLTPLEKARQPKKVLPAVSTSLALAAGIGLLEMDSPMRAPAEQFLTLRALGAPPIIVALAAQGAFRGFLDTRTPLYAVGAGNLLNALLDVVLIFPLGLGVSGAALATVTSEYLTAIILLWKLNDEVDLLSWNIIEDGVIRYLKSGGLLIGRTIAVFLTLTLATSLAAREGPVPMAGYEICLQVWLTISLLNDALALAGQALLASEYAKGNYKQARTVLYRVLQVGGVTGFVLAASLFVGFGSLSLLFTDDPAVLDVARSGVWFVTISQPVNAIAFVADGLYYGVSDFAYAAYSTFFAGAVSSIFLLLAAPNYGLGGIWAGLTLFMSLRAVAGFWRLGSKGGPWNVILSGQIVSKTKI

SEQ ID NO: 70178 - protein, 864 aa, Zea Mays
MDIVCEVCGVVGYRQLLIQCSNCKNAARYCLDPVIYDASAIEWLCDDCPPKHNEETQKAVGAVGPTMNTMECLDLSMGKDGCSFSQNCVEGFTQGTKSDFFSSINDVETSYPFVKGSSCPTLPNMEQKDGVLENAEQPHLLEMVNLDGTSHSLVDPPLEIKEQGAEAGLFASVEDVEQTHPILTDETSPIWSSEEQVDGSCPASESREQPVPFKVVILGPWHDVPNSILRSRPPSNYSQSMQGSDLYVGNVDVLDLSKEQLDSRLKPEEQGAEDGLFASVEYVEQTHPNFTEEKVDGSIPTPASSEQPDQLEVVRPWDDAPNSTLRSKPPSNYSQPMQGSDLDVRNMDALDPSKEWLDSRLLSNTVEPSSSSNGGGTSVEKDNIEKTERLSGIDTVTPGLDNVQGSNPSAEPSSSSTGEGNSAVEKHSAEMTECLLGMGILNPALHNVQVLSPSTPKECLVSSADKSDVANRSDEINHSLDDFNQSNPKPVLKGRVSKMMCPRLAFQLPKVLPVCEHHKREMSLPSKHVSPRKATKSSFRKQYEGPNRHVSRHTEHQKTKLVMKDRNTGPAHMRSCRPTKQIDCTCSSASLDSSTKTKEVNDAEPRCSKSVKTFENVMAKKRKRPILSYDEDAKAMQMEVRMRRRHRESGVMKLRRSTENSDEAMCPGNSNNQLTNDHTKARKQRRANKDNKTPPVNASVPCTQIDAARLASDQQSFICTRPIDRPYWTGIMKIGQEYISLVAHLSNQACKKVQELSMSLPPLMKVTKHSKLKAWPGRWKASEPTAECVGLYFFSDNMRELDQLVHYLNDHSLVLKYVVGFAKLLISPSVFLPEQCQTFQGKRYLWGVFKRRMNTGRIHHVNAK

SEQ ID NO: 70179 - protein, 578 aa, Zea Mays
MDLEAAGGAEAAHGKRRATLLLAYQSLGVVYGDVATSPLYVYKSAFAGDDIQHSEGNEEIYGVLSFVFWTLTLITLLKYVVIVLRADDGGEGGTFALYSLICRHVRAGLLPGGGTRDELMEEEKATGRRGERPVSRVRAVLEKYRVLQRLLLLFALLGTCMVIGDGVLTPAVSVFSAVSGLELSLEKEQHKYIELPVACAILICLFALQHYGTHKVGFLFAPIVCIWLLCISAIGLYNIIRWDHHVYRALSPYYMYQFLRKTQTGGWMSLGGILLCVTGSEAMYADLGHFSQSAIQIAFIYVVYPALVLAYMGQAAFISQHHNFESSYHIGFYVSVPETLRWPVLVIAILAAVVGSQAIITGTFSIIKQCSSLSCFPGVKIVHTSSTVHGQIYIPEINWMLMILCLAVTIGFRDTKHLANAQGLAVITVMLVTTCLMSLVIVLCWNKSIFLALGFLLFFGAIEVIYFSASLVKFHEGAWVPITLSFIFMVVMCVWHYGTIKKYEFDVQNKVSVNWLLNLGPSLGIVRVRGIGLIHTELMSGIPAIFSHFVTNLPAFHQSIGYTGSLSDTVIAMSRKMT

SEQ ID NO: 70180 - protein, 76 aa, Zea Mays
MNPSTQSQTAAQILSLPPSWCRRKSGSKSVGIFPRSKLRLHSRPADFDLGDVLPTTVDHATLENPDRHLDCMCISR

SEQ ID NO: 70181 - protein, 73 aa, Zea Mays
MVCSSAWWRPSDLRFDRRSKPSAHRRAPLARFCPAMCILLCADCSSPSSARRVPGSSSACVPLSSPMVLGVSP

SEQ ID NO: 70182 - protein, 158 aa, Zea Mays
MPSAMPNFREMNKVVVTGRASQMHQVFSAETRAKEKKQPSLRKLQSIARLPSQRARSASPAQRAHPMAPAKNATPTNRDKRSESPVPSTAPAPLTRSASLSKKASLLKTSSVRAQVDRSDDSKDGERTPKKSKKFLKSILSRRKSRKDEPLPSYFDDY

SEQ ID NO: 70183 - protein, 135 aa, Zea Mays
MEVMGLMLGEFVDDYTVRVVDVFAMPQSGTGVSVEAVDHVFQTNMLDMLKQTGRPEMVVGWYHSHPGFGCWLSGVDINTQQSFEALNPRAVAVVIDPIQSVKGKVVIDAFRLINPQTMMLGQEPRADDIKCWAPK

SEQ ID NO: 70184 - protein, 112 aa, Zea Mays
MAAPSHLHLPGCPQTLALPLPWPRGFSAPPGLLSRSRRLRPVAALGPADAGDLLGRVEALLYTVADAAVSAEPVAAAGTKEAAAGDWLSSITNSMETVLKELSPQQVDLSLF

SEQ ID NO: 70185 - protein, 70 aa, Zea Mays
MGILVAVCRGVIYRRQEFSDWTVVHAVSCTRVFPRVHGGTLVAALLGIGHGRATIPRRRTKSAARRGQPC

SEQ ID NO: 70186 - protein, 154 aa, Zea Mays
MASRAPLPGSPASIPILILSFFQGSVCGITFTFTNRCGDTVWPGLLSGSRTPPLETTGFALAPGQSRSLYAPQGWSGRFWGHSGCTFDASGKGSCATGDRGSGEEFQAARDSMQEVMVRNSVEATTSLTSTQQGRHMRTGLFNVSTVTPFPRQF

SEQ ID NO: 70187 - protein, 1429 aa, Zea Mays
MGAQEEAVDEMLRAAAAEVSTSSVKRRLRIFHHTLPPLIAKAIESPSDTVLLVDLIFQTLPIYDDRASRKAVDDLVIQALGEPTFMKPFAAVLVQSMEKNLKVTNPLTSLKLLRWSHYLLKWSQFATLTKGAFTRLANAQAVLCQVLMDGSFRRRRTCKQLFIHLFSEHSGIYKMYIEELRDLRISMRDSPAFLNLILDFTITSPSLSTQYQSVFLDLYVKIILSSKDRPPKAATEAFKPLFLNIGHEDFKNTIIPSCIKMLKRNPEIVLQSIGYLLKTVHLDLSKYSMEFMPVVLHQARHSDEERRINALSIIGTLSEKSSDPDALPSMVNAIKAVLGGSEGKLSLLYQRIGMINALEQLSRSPPKQIGRLAPSVSTFLLTCYKDDGIEEVKLAILSAIGSWALVSAEAVQPDVVSFIAAGLKEKDTLRKGHLKFLRVICKNSESLTKVASLLDHLIQLSKTGFSKATQRLDGIYALFAVSRLAAVDTKADGAILKEKLWTLIAQNEPSLISLQLLPKLADDDCLAVLDLVQSLFVEQFFRVREYFSIHSLLQLLIYLLCHPSWEVRKVAYDVTKKIFSSSSGLAEDILFLFTDWLSLVGERLSILKQGDMDSPSDSQLPFFPSTEVLVKCLFLIAPYAVVHSLRSYSRIILCSHHPCLTSSSSPAGVYKRLQRRLRQEQIFFVDLITPNISVICKHFIGLQERTLHDSFSESDIKIFYTPEGQLSTEQGVYIAEAVANKNTKLAKGRFRAYDDQMQETARSIVPAKNEKKESSGIGKRETGKSTKRTAPIDKAKTAKEEARELLLKEEASVRMKVGQVQKDLSLMLDALGKLAIANPIFTHGQLPSLVNYVEPLLSSPIVSDAAFCTMLRLARCTAPPLCNWALDIAAAIRVISVGDFEMVLDLTPVIMEDDSKKPSSGIFEQIVNGLTIACKAGPLPADSFTFVFPIMERILLSSKKTCLHDDVLHILSMHMDPILPLPRPRMLSVLYHVLSTVPAYQPSVGPMLNELCLGLRGHELAQALVGVYAKELHVRLACLTAIKCVPVHSVQRDLQVSTSLWIAAHDPEKVVAELAEELWDRFGFDAITDYSGIFNALSHKNYNVRAASAEALAAALDENQDKMQDALSTLFSLYIRDIGTSVEFGDAHWLGRQGIALALHSIADVLASKDLPVVMTFLISRALADPNVDVRGRMINAGILIIDRHGKENVPLLFPIFESYLNKRASDEKTYDLVREGVVIFTGALAKHLSKDDPKVHSVIEKLLDVLNTPSEAVQRAVSDCLSPLMVSKQEEGQALVSRLLDRMMKCEKYGERRGAAFGLAGVVKGFGISSLKKYGIAVTLQKNLEDRMSAKSREGALLGFECLCEKLGKLFEPYVIQMLPFLLVCFSDQVLAVREAAECAARAMMSQLTGPGVKLVLPSLLKVSIYLI

SEQ ID NO: 70188 - protein, 254 aa, Zea Mays
MQSKVSATREKEVVQTACHKDITESPWDPSYLFMVHDESDWEKVIESSKQITVRMAKALPNEIRIPDPTPDYMRPAFYSISHRLGPVLKKDSVRCFLRLFAESPKAMTWYLNINSETLTCIVSHDALRCAKVVLEGKMRKLNSLHANPNCINSYGYFALHEAAERFSVEMIKLLFRHGASANVRTVGDKVIENLLPLHVAIENTCMHKYLEDNLSPPQYHRDYIYKLIHLLCLPEMVRFIPSLHKVLLLMQHDK

SEQ ID NO: 70189 - protein, 879 aa, Zea Mays
MNDVASLVNSGSANTRWNTAESNPCNWEGITCTNLSAPFFASSSSSCSMKEGLQSLNLSTNRLASPLGELAGFPQLQVLDLSFNSFASRNLSAELGYFPKLRSFNTSSNDLNGDVPTSMVGSLEELVLSSNNLSGPIPLRLFEYENLTLLDLSQNNLTGAIPDNFTSLSKLETLLLSGNKLIGEIPSSLSNVTTLSRFAANQNGLTGPIHSWITKHIGMLDLSYNKLNGTIPSDFLSHQGLQSVDLTSNLLNGAIPATLSQSLYRLRLGGNQLGENIPGSVCDTMGLTYLELDDNQLTGVIPSELSKCKNLTLLNLASNRLHGLVPSITGELDKLVVLKLQNNTLTGQVPSTFSELKSLITLNLSKNSLSGAIPSGIFELPKLSNLYLQGNQFSGFIPFSISSSKDLIELNLGDNALTGNIPTMPTTVTTSLLNLSHNLLDGSIPSNINSLGELEILDLSHNALSGAVPSSLWSLQSLTLLDLSYNNLSGSIPRFGPSQTVDIVGNPGLVIVNGTGNNNDTPTTGKKKRHYLVVIIFTIAGTLVGLCVLALIIVMSLSKRVYRVEDEGLPAGESVPQIISGRLITMNSIHTSAVDFVKAIEAVSNHQNIFLKTRFCTYYKAVMPNGSTYSVKKLNSSDKIFQIGSQEKFSHEIEVLGKLTNSNVMVPLAYILTADCAYLIYEHAYNGTVSDLLHGGKSEVIDWPSRYSVALGVAQGLTFLHGCTQPVLLLDLSTRTIHLKSKNEPQIGDIELYKIIDPSRSTGSFSTIAGTVGYIPPEYAYTMRLTMAGNVYSFGVILLELLTGKKSVSNGTELAKWALSLSGRPDEREQILDTRVSGTSIAVHSQMLSVLNIALSCVAFSPDARPKMRNVLRMLFNAK

SEQ ID NO: 70190 - protein, 154 aa, Zea Mays
MQLTNDTDQHMAFKLSSTDSVDWLEQFLPWYGIVAARSTYTLILNVFLERDTAEKRFCDMILESCTCEYNDNNMYSATTYWEKFVDQETKKVVNEVKLTALLSSSQHRQSIVAPDKPTGLGVRVSWVEKPWIRLLSVDAHPTEPWIITGHECGH

SEQ ID NO: 70191 - protein, 299 aa, Zea Mays
MAWGTSGVPSPARSSSSSPSSRAPGSYSSSAPTFPARSPAFLKFVARPLYFSVADAQLLAPARVPLLSSGREQLPGAWTRLSALPAPITAYASPCPITPFLHLPRARHGARPCLSLDCVARLWSKKIPLPSPSARLPCSCSSPFPAARRVLCRAKLAHLVHGHRAKFVLRELLCLARPLFGPSSFSSPLPHSAVVVVARSRDRLTACRVSHILGPRRSPSHCVRQHRHFPYPVLARFSARPRVLSTRSALIPNRVVDLVVCRRVVKHVIPPRSPPHQLTPDFNRRSSSFVHPQENPRIG

SEQ ID NO: 70192 - protein, 83 aa, Zea Mays
MLLASSSPDSRDFLMTRGTITRSFLERAGEVGVVLGLEDDERAELQTHAREIERRATRDLSIRGGNLDESELVTTLPAKRRCK

SEQ ID NO: 70193 - protein, 580 aa, Zea Mays
MGISSGADFHQQPTPQAVLPPRPHGRAPTLQTSLSLAGSASPEQVGSPPDTQEPLSNSDAGHDSATESASSRETWPGEPGKSGGGDAPPVASAPITALRIADNKEKEVVGNGVAELQAFRSRIPSAGRMTLREVAWDRVDLVAEKMKGMSDELLDETKAELQSILEGTGGQHQIQEFMYLQKLLQGRVDLTLPILLMAHHVQLEILVAIKTGIQAFLHPSVDIPQIRLAEIFLYKRCRNIACQSAVPAEECKCNICSNRNGFCNLCMCVICNKFDFEVNTCRWVGCDICSHWTHTDCAIRDGKIGTGQTIKNGVGHAEMLFRCQACQRTSELFGWVRDVFQQCAPNWDRDALLRELDYVCKIFRLSEDSKGRKLFRKCAELVERLRGGSAESMTPRILLQALQELDIDSSKNFEHQEPGRLITPQEACNRIAEVVQEAVRKMEMVAEEKLRTYKRARLAVEACDRELEEKAREAQELKVERLRNVALAKRKSEAAGQDYASMYLKRRLEEAEAEKQYIFEKIKLQENQHATSSSGGGARLGGGAPSAGEPSQAMMLSKIQDLLKNVRSVPSGKPDGQRSK

SEQ ID NO: 70194 - protein, 1176 aa, Zea Mays
MASERPLLIATTPGASTPDDAPSPHPPAASLLPPAQSEPPLRADRLAFSVEIPDPFRSYRRGDGPAADPSASLERERDVGDDESREVIVGESSPEFSGNAIRTAKYSFLTFLPRNLFEQFRRLSYVYFLAITVLNQLPQVAVFGRGASVLPLAFVLFVTAVKDAYEDFRRHRSDRQENNRLATVLALGTAGEFQPKRWKHIRVGDVVRIESNETLPADMVLLATSDPTGVAHVQTVNLDGETNLKTRYAKQETHVMFSQNGGVGGVLHCERPNRNIYGFQANLEIDGKRVSLGPSNIVLRGCELKNTTWAIGVVVYAGKETKVMLNSSGAPSKRSRLETQLNRETVILSIMLIGMCTTASVLAGIWLLNHRRELEFTQFFREKDYTTGKNYNYYGVGMQIFITFLMAVIVYQVIIPISLYISMELVRLGQAYFMGADKDLYDESSRSKFQCRALNINEDLGQIRYVFSDKTGTLTENKMVFQCASIRGVDYNSGKDTGGYSVVVGDHLWTPKMSVKIDPELVKLLRDGGSNEEPKLVLEFLLALASCNTIVPLVLDTRDSKQKLIDYQGESPDEQALAYAAASYGIVLVERTSGYIVIDVLGDRQRFDILGLHEFDSDRKRMSVIVGCPDKTVKLYVKGADSSVFGITNNSSELDIVRATEAHLHKYSSLGLRTLVVGMRKLSQSEFEEWQLAYENASTAVLGRGNLLRSVAANIEINVNILGATGIEDKLQDGVPEAIESIRQADIKVWILTGDKQETAISIGYSCKLLTNDMTQIVINNNSKESCQRSLVEALATTKKLRAASSIGTQGPLLASETSNVTLALIVDGNSLVYILETDLQDELFKLATECSVVLCCRVAPLQKAGIVALIKNRTNDMTLAIGDGANDVSMIQMADVGIGISGQEGRQAVMASDFSMGQFRFLVPLLLVHGHWNYQRMAYMILYNFYKNAMFVLVLFWYVLYTAFTLTTAITEWSSLLYTVLYTSLPTIVVGILDKDLNKATLIAYPKLYGSGQRDDKYNVNLFVLNMLEALWQSLVVFYLPYFAYRRSTIDMSSLGDLWALAPVIVVNMQLAMDIIRWNWIIHAFVWGTIAATTVCLFVIDSIWVLPGAIFHIMGTGLFWFLLLIIVVTAMVPHFVFKAFTEHFRPSDIQIAREMEKFANVNQVNRLEFPTRGLS

SEQ ID NO: 70195 - protein, 60 aa, Zea Mays
MSRRPAASPRSVDPHRLSYISPLVGKEARSNGLLRGLVLPCSSVPTLSTIKFQVLTYRRR

SEQ ID NO: 70196 - protein, 254 aa, Zea Mays
MATRNEHRFRRETRASIIIQEKHNEQFLESQTRWRQHRAYAAYKQQQKASLILQCLWRARIARKELRKLRMEARETGALKEAKDKLEKRVEELTWRLDVEKRLRADLEEAKSHEIEKLQSALQKMQENLEEAHAAIVNEKEAAKLAIEQAPPKIVEVSVIDNAKLEELTTQNKELEDELSTFKQKAEDLENKLIEFQKQSDELSQETQEQASKVTQLQELVERLEASLSNMESENQVLRQQSLVVASADEDKSK

SEQ ID NO: 70197 - protein, 104 aa, Zea Mays
MLPMRFRGSLIRKRPVCFQRRKSRRYLPDSGWTANLLACSKKKNRQAEGAVEVRRKLGRRRGPVCTAELGQREPALCFRRDDTHFRRTDTARMDRSVWRRCHLS

SEQ ID NO: 70198 - protein, 476 aa, Zea Mays
MGARAARTPGQPAQRHPSGVRAARARRLQRVLQLPPGRGPRHPRVATVPRERVRPQPQALWRGCERRLPGPGGAAVVRCSSVWKQQSGREAGWRRRSGGTEALAVQAGGVERRGDLPHRGAGAVRSCVHLLAPQEEEPGVTAAEDIKDKVEVEQGRGSGSRSTESGKGAELQLFRADGASFDLDELFRSTAEMLGKGRLGITYRVALQAGPVVVVKRLRNMSHVPRRDFTHTMQLLGKLRHENVVDLVACFYSKEEKLVVYEHVPGCSLFQLLHGNRGEGRTPLPWPARLSVAQGMVRGLAYLHKSLPYFHRPPHGNLKSSNVLVFFSAPNGKQQKQAVPKLTDHGFHPLLPHHAHRLAAAKCPEFARRGGRRLSSRADVYCLGLVLLELVTGKVPVEEDGDLAEWARVALSHEWSTDILDVEILGDRGRHGDMLRLTEVALLCAAVEPDRRPKLQDVIRMIDDIAGGDGSELDRR

SEQ ID NO: 70199 - protein, 271 aa, Zea Mays
MEVAAAATAGAGVVELQLDLLEAAAPTEREAKRRRVHPVPAGPPAGVQLLRHMLDRMRPEDVGLSPDLSFFRARDATRGGGTPTITHTTIYKCPNFSMVILFLPRNAVIPLHNHPGMTVFSKLLLGSMHVKSYDWLNTADPDPSSATSTTSSSSSDGPCLRLAELVVDDVFTAPCDTSVLYPTAGGNMHRFTAMAPCAILDVLGPPYSIEEDRDCTYYAELPYAHHSLVAAGEDVERGQGQGHLAWLEEIDMPRELKMCSVHYGGPPISDE

SEQ ID NO: 70200 - protein, 567 aa, Zea Mays
MAPPTSASARPLSLPLTVPLSCHRSHLLPAPNARLLTRRRVALAPTRPGATLLSSLSDAREEEEDESGFYEEDEQQEFEDEEEQGYDGENEELVEVGYVSGAHGVRGDVLVTPRTDFPELRLATPGTRWLRARAAGKQQVREFELVRGRAHTGKKSWIVSFDGVNNLDEARQIVGSAVLVKARDRPEIEDDEFYSLDLVGMRVIVKEWKDRKRFQRRVIAGKKVLSEMDQVHVLEGLVSGDKVQKASLAEQIGSIDFQLFRHAVHCVSKQIESSSMNLLANSSLSRKKVIKIPYKTLINLGDKAEHAFSTEFKNGLDILLKSKAAIVLVRNGSDSDTEFLSLLNSFSELMKVVENKVSPPLIVIAPAGHVESVRKCLVENDYFGFDTQKVWVLEEVELPVVSICSEGNRKKVLMKSPWEIIKKPTGSGAIFSLLLSNKILETLNEMGVQYTQICSSSNKPIIGHPLLFGAVASRGADVGIQVSKTGETLDDFDVILSIDQLNKMCRDVTQIRFSARSEQNVHVEHVDGQWVAVQPEVANSHRLHAEVTSVLDSCAPDKLCVMEIVEQ

SEQ ID NO: 70201 - protein, 70 aa, Zea Mays
MGKNISLILSSPSTQYLCSSSSRSLLRGGRSRGRRKSWRGAAMGGEDSQPKGKEERGGQVWEGGKGVAAK

SEQ ID NO: 70202 - protein, 165 aa, Zea Mays
MEKKRYYKNKGGEAHVCENGTPTRAPPTPPPMRTPPTSPSTWAFSSPTSATNASWLRTAKGRSALLQTPRTSASHSARPWSTIAVHRNLGPIPRPSSSFRHAHCSGKLRLLASNSRHPLVCPYPLYSPLLTLTGFSPCSRVAPAVDPGPRCVLTIAQALQSCLSR

SEQ ID NO: 70203 - protein, 778 aa, Zea Mays
MGIQGLLPQLKSIMAPISAVELRGQTVAVDTYSWLHKGALSCGDRLCKGIPTTRHIEYCMHRVNMLRHFGVRPILVFDGGLLPIKSYQEGKRARSRKENLERAREHEAAGNSRAAFECYQKAVDITPRIASELIEVLKKENVNYIVAPYEADAQMTFLSVNKLVDAVITEDSDLIPFGCSRIIFKMDKFGQGVEFQITRLEQNRELDFNGFTRQMLLEMCILSGCDYLPSLPGMGVKRAHALIQKLKCHEKVIKHLRYGAVSVPPQYEEDFKKAIWAFKFQRVYDPATEDIIHLSSVPQSLIEDLEFLGPWLPQNIAKGIALGNIDPLTKEPFEINPECSAPSVHKVCPTREPIAPSNGRKKLDLPVQKNILTNYFCLASLEAKRKFRAPKVTHKQQILNEALPSPQAQGSATSDSVEDTRLPTDRIQASQCSSEHLSSEPPQNDPISVGSQCSSERFSCEYPLDDSANISQCSSLDGGSDPPYKDTGNKDRKVEAGYDNKNRIPTSPCIMGNLPWTSEPFLVPHNVGPSIPVQHYTESTVASNNNGITVSSYFKTANKRICTDQGDQLDDDYDVSTGNLCGDQLRKSGMLKRRKLSGIQKFEDETLQPIHSDDSPPFVDEGQDTDDPDDTNIRTEGRFGCNVSHVNTYSGIAEKSMDKFAALISSFRYPGPRASGLRAPLKDVKNTLSVRSILKAPEKDTFRRTAKKTGLGPPSKSRYTSDDKGSAASPPDISAFAYRPMKTVASDQGKTTVGRLNGSRFRETAPKATGGTSRSQFK

SEQ ID NO: 70204 - protein, 664 aa, Zea Mays
MTDWVYMPWVTPSANPVRFVVRSPPPSCCQSRLGNRIVRESSMKGRLLLLLWAWAAATWVSVSAVTRLGRGVAGEQPLSRIAVERVVLAVNDAAYVKASPLVLGHKGENSEWADVEFFHPNPSDDDWIGVFSPANFSDAICEAENTGTPVLCTAPIKYQFANFENDGYNKTGKGYLKLQLINQREDFSFALFSGGLSKPKLISVSNKVAFANPKAPVYPRLAQGKSWNEMTVTWTSGYDITEAVPFVEWGEKGGRRLLAPAGTLTFDRNSMCGSPARTVGWRHPGYIHTSFLKDLWPDSPYTYRLGHRLMNGTRVWSKSYSFKASPYPGQDSLQRVVVFGDMGKAEADGSNEFSDFQPGSLNTTYQIIRDLEDIDMVVHIGDICYADGYLSQWDQFTAQIEPIASRVPYMIAVTMRGIGLALVHSTGTLTPVESAASLPKLCSTLQLRTVQNSGTRRTTACSGSASQTRKRTGGRGPSSTSSSSNACRRSTGRSSRGSSSSRTAFSATPPAPTTNRRARSRSPWGGKRCRSSGRSTRWTSPSMATSTATKGHARSTSLSASSMDPTTTAARSRRRRTSLSAAQEPAFSILSSPPRRSSGATSPTSTTGSSSSRPSTIPPCCSSTRRAATATCMTISQSHATTGTSSLAPSTTAPGAHWLPEVPQ

SEQ ID NO: 70205 - protein, 277 aa, Zea Mays
MYLDLYSRKGKHPGCAHFAIQGGRRLSDSNYQLPIIALICNFSGACRKTARLNHGDVETLFHEFGHALHSLLSRTEYQHFSGTRVALDVAETPSNLFEYYAWDYRVLKTFALDETTGDAIPEKLVKALNASRNMFPATELQRQIFYSIMDLTLFGEQSSKPMDTISTVADLRRKHTSGKYAEGTHWHTRFTHLVTYGAGYYTYLYARCFATTIWQEVCQEDPLSRSAGSAIRDKFLRFGGSKDPSSLLKDFAGDAVIRNSGSGIIPNASSLCKEIGL

SEQ ID NO: 70206 - protein, 76 aa, Zea Mays
MTTTQTLRHAFAVKKKRIVRQADSHHSALLRLSLSNAPGLRQFGRLKNGLLQYKSQTYNFFFFWIHLMVFITDEIV

SEQ ID NO: 70207 - protein, 395 aa, Zea Mays
MDRGVVHKSSAALVREMGEAGHSHGWWSMNNLLRPPFEQQHHASLFMPSTTTSSSTAAAAPSSSSSSSPPLQSFSSLLLSNHYPLPTTTSTSPWQHDTSITSSHGQPDSWSQLIHSKESQQMAFPTTICSESGGGGSSYVVYGAAAASHGSSTSDVEIQLPWGSSSVLQQQQKASSPRSSSRTTATTTSPGSNMLEFSNNSSSSPRECISTVSGSAFKKARTQEPSPAQSTVKVRKEKLGDRITALHQLVSPFGKTDTASVLLEAIGYIRFLHSQIEALSSPYVGGSNGGGGGSKQNQQLHEASAQRESRHSIFPEDPGQLLHDSSAIKKRAGLQPADGEQDEESCDEEKKKDLRSRGLCLVPVSCTLDVGVDVVAGPADYWAAAAPAFGMGFGA

SEQ ID NO: 70208 - protein, 64 aa, Zea Mays
MPLGDRTTWSAIRRCSRPPAAGQASVPTSCTPREPLKLHRASSLLHHCRLVPAKASSHRCQPWK

SEQ ID NO: 70209 - protein, 123 aa, Zea Mays
MRLVRICSKRQFSSLVLRYTPIRLYPSKCLLLEKKKGGVWVRPRGRAGTGEGAVPYVEARAGPSPPRCANRHVGRAWAAVRRRPWHARAGGAQSRSCPAPRPRPADPDPDPGRRLPMMAHPGN

SEQ ID NO: 70210 - protein, 379 aa, Zea Mays
MGAELGEAGVPARDMVDALEGVRSILLKPSERLDDKRFTRIAGADFDDAGLGLAGLLGSLASTGFQASNLGDAIDVVNQMLDWRLSHEKPSDDCAEAELDPAYRESVKCKIFLGFTSNLVSSGVREIIRFLVQHRMVDVIVTTAGGIEEDLIKCLAPTYRGDFTLPGALLRSRGLNRIGNLLVPNDNYCKFEHWIMPILDKMLLEQSTQNVWTPSKVIARLGKEINDESSYLYWAYKNNIPVFCPALTDGSIGDMLFCHSVHSPGLVVDIVQDVRLMNAETIHASPRKTGIILLGGGLPKHHICNANMLRDGADYAVYVNTAQEFDGSDSGARPDEAVSWGKIKSSARTVKVHCDATIAFPLLVAATFARKVHGTKSTN

SEQ ID NO: 70211 - protein, 72 aa, Zea Mays
MSLLVCYGWFFDKKPKIVRSILARKCHILKEFSEVNFLRAKTVIFYLLLKYILFCFIYMPKYVAIKLYKIGP

SEQ ID NO: 70212 - protein, 2067 aa, Zea Mays
MDLAGMKRRELQALCKRHGLPAGGTNADLVGRLDAVLSGPAVVEEEVAGVPARKGCLKQTGGGATEAKKVTFGAEVGKARRLRSRVIWSPVVAKTRGKSARAGTDSAAEDGISADVGADVPVRRSRRNSFNPAEAEEAGEAVAVDRKPKRKNQENDEGVAVIAQARVTRRSNLEWSATVLPPAVEKKRGRQNAAESDVQKSALVEVTARTTRSRSIVPVVVPPTVVENKRRKTGDPQTTVELTMLSDVPRSDFPATRSLRNKIVHVNNSVVDETHTTRQLENKMRPSTRRHQQVASSPEDKGQKIPATSKSPLLRWSRRNYSEANSANSVNIKLAKDSSTAQPLAHHNSHSEDLEKQPAVKEPIKRSTRKSIALAALEKEKDVIEGKNPEAHVRRSTRKSVVQVKDTKSIVEETQYANSEDVAKQPATKGPARGLRRKSVITELHEKEKSLIAEKNMETDEAILTRKPVIPVKNIKAVGEGIQIGKGKDVDKQFVVKQPTRRSSRKSVLPDMLENNSGLLAPKMNAEMNVRRSTRKSVLPDMHNEKQDHHKMARNENLQSGKYQDGEKQQKVKDSIRQSRRSIATVLLEGQNNDEGKKFKNPTRRTTHKSHALNAVEEVSMDHIEVGEEGLKLRKRSRFLLEISSSANVSWKHQNAQISNEKDNTEGSQQASNCTTSKRRSSKKRRTTAPEEVMPFKVANDDIVIMEETKDTLEYNNESSSKVQEICQVNAAREEFSSGPLLVTVAPSDEICTVQSVAVVIPGSESGDDANQSSDKSKQPQEHSVTQTVDDHLSETRSGKLDQSTCITGLVSDNCVVSEDKTLMSEDREEQSPVSGEQRVSLEANANEPEEKNLANVTSTDLHTKSLQHDIDRIAKETDKEHEEKYGVSPIAVEKCVCREASACESARKPLTVIFSNNLHTKHLQHDCDVLIKETGEEVLAQENCNDQPVPAQTDQEIKLNDELADPDVLAQENCNDQPVPAQTDLEIKLHDELADPDHEEQSPVSGERRVSLEANANEPEEKNLANVISIDLHTKSLQHDNGRIAEETDKDVLAQENCNDQPVPAQTDLEMKLNDELADPEVLAQENCNDQPVLAQTDLETKLNDELADLAMESGCSITERNEGLVAHNLDQEGFLEATPECKQECGLPEETVISSKETGSLLCADQSPIGLESLFSQESIVESVGHCALASATTHTENGFDDSKDCHNKSALENVHVPEPCSHNDTKGGIFKNVDCMHTSQRDDRMEGVPEANTDEEHVLSAFLLDANHLNVVINSEEVVCEGEDSKELLHSEDCKASSEKTDVNDGNVYGISDAVVRCALHAPADDNYEIFLGPNTDVPRQVYNDGCSDVKEDRFASKPWTIDIIEDASVKERSNLKDWQLDSKLEGTEIVESGLYFNKDIGNILHSGSIGEITPSGSGLSKDSSVDYRGEVLDGFSMEASLERSSTRGEQNGCRLDAIENPSITLATSGYKHEGALSEEAVYTKKNYAGTCLSNPRELIMELQSHFSKENINESDPHDSLVFPTAENSADEQLVKVHHGSNLSQLGLTDLLDGPIGCSNTDVLCQCDNHKNQSNEDKVEEVEAVSAAKYIESEVVLLPSQERSNLNNEQLNTKLESPNIMGSCLNCDNDVCNTSDNGSVFVIGKRTPSASGLPEDYPKDSDLQQPVLDSFSVVSSFQDNISGKKTVSGVAGSEILSLSLATPDYKHEDGFSEEAVCRTKNYTGTSSVDPRHLDMEGHSIYSEGDTYQGPCQDLGRHEEQESCMSIPMQAKESGGVLRSSHTKGSVTAAQIDLAGDAHLIVSDNAAAKQVFSEEKEETKSISSSDIDILHEKSYSSGHDDHAACAAETQFYHPQKASISDGLHLGPSSLQVESLDALDSDILYVNTGVLEQHHKEGYYEPSVYQITSGICTMSEAEPFEVLETGKDVKTPSKLDEQLNPGLDGDEAEKHSLDCGTDTSPVMSKRTLSSPGSGICQSSRRRGIDELCGKLQSFKVSSAVKGSYVAMGAPRPKPGDSTSRSAAALLRNIENTTAVKAGRPPVKPNADGKDSSRRALQPISGRPDSR

SEQ ID NO: 70213 - protein, 438 aa, Zea Mays
MPVMNFGALPGVVLPGVTAYGAATLPSVVPVPYSLPPHIAPSVLQNAAAAAQKLSQAKIPDEVIAREIVINDADPSVRYKLTKRQTQEEIQKCTNTVIITRGKYHPPNLLPDGEKPLYLHISAGSQLKDTAERIKAVDRAASMIEEILKQGTTSESISVPFSSSTGQAVRPFSASVFLGFDADPSLNITARIRGPNDQYINHIMKETGVTVVLRGKDSENLGSCHSEASQQPLHLYLTSMHLKNLEAAKVLAENLLDTVAAEFGASRISSSKVYGAVPPPQQLLAGVDTSGTKSDVHYIVGPNVLSGATHSFASTGVIAPVVAPAVTVQSGAPTYSGVPLPSNMAYPIPPANGGAFYSGYGDIYPQATPLQQLAFTLKHASSSATQAVPVTSTPTSMATKGNSILDAEMDKRSRRKFQELPVSKGPATESQVQFFFLV

SEQ ID NO: 70214 - protein, 607 aa, Zea Mays
MAGAAASPVAAHVVERFRSRLREEAGSGEPGASAVVRLYAEALRELTFNCKPVITELTIVAGQHAALAAGGIAGAVCARVAEAHQSAAQDTRQMSDVQEDLINGLTSNSSQGRPSVFQHVDISTRRYPSNFGVQNGALLEYQNSEHTLNHGRIATMPAPPWQQPIGLPLRIQGPEHPSVLGRIPQPVDGEMPVKRLDISGTYNGLNVDKPLVKHRSSPAPAPTEWLPLHHAQSQTLPLIPPDTKHVRSASDSLEISSFVSHGGSSSVFVPRHQYDAVDRKTGTSNLAQPPSPYQNQDLLPSSQQNQGTILGNQAHPHRPLKLHPHAHPHHQETFRSFAPGMSVSPFQGQGGNATMTPVSVLPTSFSVPPAVPPYGVLSAPGFPMPPLPPGPPAPVSLQMGSSSSQVGGPQPFVSGLLSNLMRHGVISLEPPSQSQDSVGVDFNVDLKVRNESVTNALYQDLPRQCKTCGLRFKCQEEHRAHMDWHVTKNRNSKNRKKSSRKYFVTAVEWLRAAETVGNDGVPAFVLSDPVPDRQEEKEIAVPADEEQTSCALCQEPFEDFYSDETDEWMYRGAVYMNAPDGNIDGLEWSQLGPIVHAKCRSGPGNTS

SEQ ID NO: 70215 - protein, 716 aa, Zea Mays
MDMLMDREVIRNEALLLLTYLTRDAEEIQKIVVFEGVFEKIFSIIREEGYSDGGVVVQDCLELLNNLIRHNASNQMLLKETMGFDPLISILKIRRGSAFNFTQQKTVNLLGALNTVELLLMGGPSGEAGKDANKNANQTALAQALRCIGNLVLRNPQNLDSLARKQVGEEPHVQPALNAIFSIILRTSVAQEFVAADYVFKCFCERNPNGQALLASTIVPHPNQGNMHEPAIDMPFGSVLLQALVSSDVNGDMEACCRASSVLSHIVKDNMQSKDRVLQIQLETLTPSLGRTEPVLHRIVTCLSIAASTEGENNQNNQPEEPYIQPVILRLLIIWLVDCSNAVNCLLESAVHLNYIIELASSKRYTACVRGLAAVVLGACILYNASHEKGRDAFAVADAISQKIGLTTYFLRFDELRRSLAHPLPEQHHRKELSRSSANSMSDFQEIEEDETNKDDQHPVLSEIFDSQFVNFLSKLEADIRENIMDIFSRTKTATALLPTELEQKNGEVDGEYIKRLKSFVEKQCNEMQDLLARNAMLAEELVRTGGGTTTDTSQRPNNGRERVQIEALRQELEGARRQIEALETDKSQIEAEANNQRNLAVKLESDLKSLSEAYNSIEQANYRLDAEVKTLRQGGSVPYPDVEAIKAQAKEEAEKDSEAELNDLLVCLGQEQTKVEKLSTRLAELGEDVDALLQGIGDDTAIPDDDDDDDEDSEE

SEQ ID NO: 70216 - protein, 114 aa, Zea Mays
MGYFSCSGSEAAAQPMPTDGCVREQVRAVLAARGREQRKGGASVGVWCGTLVLLGTSRVEKVQKASLAEHIGRINFQLFQYAAHCVSKQIERYVTPFVQHPIKVAVYFYFYIFL

SEQ ID NO: 70217 - protein, 226 aa, Zea Mays
MFQTLGSHPLLEQVEVCAEIAINCMNDDPSNRPTIQDIISSIDETDARSVTSSSPGGQVITMAGSESSSSRSRSPCASCRMLRQQCTQECVFAPYFPAEEPHKFAIVHKVFGGSNVFKLLQELPAHQRGDAVSSMVYEANVRTRDPVYGCVGAISVLQQQISQLQMQFSMARAEILTLQQQMDVNDSLPSQNSFDRYGNGDLKPDSPPEILSSEDEVEEVSSPMSP

SEQ ID NO: 70218 - protein, 169 aa, Zea Mays
MAAASSATSVHDFTVKDSSGKDVDLSVYRGKVLLIVNVASQCGLTNSNYTQQAQLYEKYKNQGLFLIHCSCFEILAFPCNQFGGQEPGTNEEIAQFACTRFKADYPIFDKVDVNGNNAAPIYKFLKSSKGGLFGDSIKWNFSKFLVDKEGRVVDRYAPTTSPLSIEVMR

SEQ ID NO: 70219 - protein, 297 aa, Zea Mays
MAYMFKYDSTHGPFKGSIRVVDDSTLEINGKKVTITSKRDPAEIPWGNFGAEYVVESSGVFTTTDKASAHLKGGAKKVVISAPSADAPMFVVGVNENSYDPKMNVVSNASCTTNCLAPLAKVVHEEFGIVEGLMTTVHATTATQKTVDGPSMKDWRGGRGAAQNIIPSSTGAAKAVGKVLPELNGKLTGMAFRVPTPNVSVVDLTCRIEKSASYDDVKAAIKTASEGALKGILGYTDEDVVSNDFVGDSRSSIFDAKAGIGLSSSFMKLVSWYDNEWGYSNRVLDLIAHMALVSAKH

SEQ ID NO: 70220 - protein, 722 aa, Zea Mays
MDQSRRAVESYWRSRMVDGVTADDDKVAPVYKLEEICELLRASDASIVKEVADFVLKRLDNKSSLVKQKALRLIKYAIGKSGTDFKREMQRHSAAIRQLVHYKGHPDPLRGDALNKAVRETANEAIAAIFSTEDPKPAVATESLGKRIQGFGNTNYEPSRDEKKSFLSELSEVVGIGSASIKQGLSNFAAAHAIMINDNGSTYKSPNLRRSLTTESEKYGRYDPSEIQSESRASSDASKNVASGSWGPTSSSAPSDDTSSSQPGVKTREERLLETIVTASGVRLQPTRDALRVFLTEASKLDAVALSRALENKLNSPLWQVRMKAICVLEAIVRKQDTDPYSIIASYFIENTASVVKCSELPQVSLREKASKVLNMLIGEEPTGTTATKSAMATPVQMPDLIDTGDQDGLATSSGQESNGQKNTGKAYVSSVDDLLGGEPIADTSVTADSNGSDPFADVSFHEVEAKETNDLFSGLIVEEKSSATMHGSSSSNKNELPDIFGSPPDSFIQGSVTDQGTVNDLMSGLNLNGTGQAHPPVKAEPNSTFSGSQFFDTNNEIGHVASAAALNGIVGQNSFYQQQQTPLQYSFPQHMMLNQSFPGQQLNYGAMGILLAQQQQLLQNFGNFNAELGNSSFNSMNSGNASVLPDIFNSSNQPQNHVAAMSSSKKDDTRAFDFVSRHVLQESEPGSDEHVHMLARAQVLDGHKSWDSKSCISSQPRRLAA

SEQ ID NO: 70221 - protein, 98 aa, Zea Mays
MCQSFEKALAKWEGVIQFLSLVSLQRHRASVWRVEDEIGLVTFIRESAMADADFEMCDNDENYILIQSNNLFEEDGDEEQGMNVFCDNIANVLFIMRG

SEQ ID NO: 70222 - protein, 1115 aa, Zea Mays
MVTPPTVEEDEEMLVPRQEAVDTDAAQPMEGTVVAQTEVVSTAESQPVEDPQTSRFTWTIENFTRFSEKKHYLEVFVVGGFKWSVLIFPKGNNVDHFSMYLDVADSTSLPYGWSRYAQFSLAVVNQIQPEFTIRKETQHQFNARESDWGFTSFMPLSELYDASRGYLVNDTVVVEAEVAVRRIVDYWTYDSKKETGYVGLKNQGATCYMNSLLQTLYHIPYFRKAVYHMPTTENDIPSGSIPLALQSLFYKLQYSDSSVATKELTKSFGWDTYDSFMQHDVQELNRVLSEKLEDKMKGTVVEGTIEQLFEGHHINYIECINVEHKSNRKESFYDLQLDVKGCRDIYSSFDKYVEVERLEGDNKYHAENHGLQDAKKGVLFLDFPPVLQLQLKRFEYDYMRDSMVKINDRYEFPLQLDLDRDGGKYIAPNADRSTRNLYTLHSVLVHSGGVHGGHYYAFIRPTLSEQWYKFDDERVTKEDAKKALEEQYGGDEELPQINPGFNNAPFKFTKYSNAYMLVYIRESAKEKIMCTVDEKDIAEHLRVRLKKEQEEKEHKKKEKAEAHLYTIIKVARDEDLKEQIGKGIYFDLVDHEKVHNFRIQKQMPFSCFKEEVAKEYGIPVQFQRFWLWAKRQNHTYRPNRPLTVHEETQSVGQLREISNKAHNVELKLFLEVELGLDLRPLPPPEKGKEDILLFFKFYNPEKEELCFMGRLFVKALGKPSEILAKLNEMAGFPPDQEIELFEEIKFEPNVMCETIDKKLTFHYSQLEDGDIICFQKSPGAEYDAPVRYPDVPSFLEYVHNRQVVHFRSLEKPKDDDFSLELSKLHTYDDVVERVARQLELDDPAKIRLTPHNCYSQQPKPQPVKYRGVVHLSDMLIHYNQTSDILYYEVLDIPLPELQFLKTLKVAFHHPTKDEVVIHSIRLPKNSTIADVIYDLKTKVELSSPNAELRVLEVFYHKIYKIFPLHEKIENINDQYWTLRAEEIPEEEKNIGPNDRLIHVYHFKKDINQTQIQNFGDPFVLVVHEGETLAEVKKRIQSKLQVSADEFSKWKFAFISMNRPDYLQDSDVVPTGFQRREVYGAWEQYLGIEHADTAPKRVYTVNQNRHAYEKPVKIYN

SEQ ID NO: 70223 - protein, 60 aa, Zea Mays
MELLSKTYPTKEKTLKGMLARGIQGMAYQESKTLFCRKAYYEWIHRNPILLVMLSKITCI

SEQ ID NO: 70224 - protein, 566 aa, Zea Mays
MDVCFSAGIDCERHKEVDGGLSRYQKCGKIRYGGYKGVVAVDTRSNHKLSLRKSMSKFQSENITLDVLAYSKYQPCFLNRQLITLLSTLGVSDNVFELKQKEALRQLNRMVTEPQAAREAVELMPMGEVTNVVKELLSCGYQPDHEPYLSMLLQTFRASKLLELKTKSRIFITQGRAMMGCLDETCTLKYGQVFVQASYSADDHRKVVVTGKVVVAKNPCLHPGDIRVLQAVDVPALHHLFDCVVFPQQGPRPHPNECSGSDLDGDIYFVSWDPHLIPSRLVDPMDYTPASAETLDHDVTIEEIQEYFTNYIVNESLGIIANAHVVFADQERMKAESPPCVQLAKLFSIAVDFPKTGVPALIPHELHVKEYPDFMEKLDKVTYESKGVIGKLYREIKKHTPHIKHFTREVARRSYDTDLIVDGYEDYITEAIEFKEEYDFRLGNLMDHYGIKSEAEIISGCILKMAKNFTKSSDADAIRMAVRSLRKEARSWFNEMSTGEDGQDAMEAKASAWYHVTYHQQYWGSYNEGYDRPHLISFPWCVYDKLVAIKQGRNLLTRMDRNLRFR

SEQ ID NO: 70225 - protein, 854 aa, Zea Mays
MAAPAIWQPQEQGLHEICTLLEAHISPNSDQARIWQQLQHYSQFPDFNNYLTFILARGEGKSIEVRQAAGLLLKNNLRTTFISMQPSSQHYVKSELLPCIGATNRAIRSTVGTVISVLFQIVRVAGWIELFQALHKCLESNDLDHMEGAMDAIYKICEDVPEELDVDVPGLSERPINVFMPKILQFFQSPHASLRKLSLGCINQYIVVMPSALYMSMDQYIQGLFNLAKDPSADVRKLVCSAWVQLIEVRPSILESHLKNVTELILQANKDPDDEVALEACEFWSAYCDVSMPPEGLREFLPRLIPTLLSNMVYADDDESLDDAEEDESFPDRDQDLKPRFHASRLHGSQTGDDDDDDDAVNVWNLRKCSAAGLDVLSNVFGDSILPTLMPLIEQNLARTDDNSWKERETAVLCLGAIAEGCIGGLYPHLPQIVAFLIPLLDDKFPLIRSITCWTLSRYSKFIVQSLDHPNGREQFDKILMGLLRRILDTNKRVQEAACSAFATLEEEASEELVPHLEVILQHLMCAYGKYQRRNLRILYDALGTLADAVGAELNQALGPGFAQFAEPVFQRCINLIQSQQLAKIDPTAAGAVYDREFIVCSLDLLSGLAEGLGAGIESLVAQSSLRDLLLQCCMDEAADVRQSALALLGDLSRVCPIHLHPRLQEFLTVAAKQLNPQSVKDAVSVANNACWAIGELAIKIGKEIAPVVITVVSCLITILKSPEGLNKSLVENSAITLGRLSWVCPDIVAPHMEHFMQAWCSALCTIRDDFEKEDAFHGLCAMVAANPTGAAGSLAYICQACASWTEIKSEGLHNEVCQILNGYKQLLGNNGGWEQCMAALKPDVVQKLARYGV

SEQ ID NO: 70226 - protein, 189 aa, Zea Mays
MLQIVECGPTNFYSMDAPAIDGERLKKYVFYKLRTELPVGPFCILYMHSTVQSDDNNPGVSILRTIYEELSPEYKERLQVFYFLHPGLRSRLAIATLGRLFLSGGLYWKIKYISRLEYLWGDIRKGEVEIPDFVIEHDKVLEHRPLTDYGIEPDPLHLADVPAEEVGYSLGRYEDKWTPEDRWYSGNYM

SEQ ID NO: 70227 - protein, 160 aa, Zea Mays
MNNFDHLCASTGRVKTRMTTYRWIAEKSIPFLKKDPNMGAKKLQEELEDKYNVKLGYSTVWAGRQKAVEQIFGTWEESFADLYRFKAEIDAKMPGSVVDLEVQEEEDGVYFRRFFCCFKPSIDGFLNGCRPFLSVDSTALNGRWNGQFSEKVKPHCNLSV

SEQ ID NO: 70228 - protein, 190 aa, Zea Mays
MIYSCQYALFVHLVFNLWQRRPSPKKQRYMLKWFFLKDCNVIRVSEIQKVLDIADERSLIDTIFFCYLGCNARFLQENPEYVAQGVTLAQFSFQIPIPLRQDYVKKKPKLINASDEASTITSKSSEPDEVNPIAWAVPTKHEGDASEEASLADETLASEVVLTRKRKIGSSLSVEPNHLSDELEPKLEDA

SEQ ID NO: 70229 - protein, 563 aa, Zea Mays
MGVSEEAARVWAELPVRVDWAAAAAQCASLWAHARALLVAPAVRVLVLLSLAMTVMILAEKLFVCAVCLAVRALRLGPDRRYRWEPIGGGVGDEEEESGSGHGAKYPMVLVQIPMYNEREVYKLSIGAACELEWPSERFMIQVLDDSTDPVVKDLVETECQRWKSKGVNIKYEVRGNRKGYKAGALKEGLKHDYVEDCEYIAMFDADFQPEPDFLLRAVPFLVHNPEIALVQARWKFVNSGECLLTRFQEMSLDYHFKYEQEAGSSLHSFFGFNGTAGVWRIAAIDDAGGWKDRTTVEDMDLAVRAMLQGWKFVYVGDIKVKSELPSTFKAYRFQQHRWSCGPANLFKKMMVEILENKKVSLWSKIYLWYNFFFVGKVAAHTVTFIYYCCAIPVSVLLPEIQIPLWGVVYIPTLITLLKALGTPSSFHLVILWVLFENVMSLHRIKAAASGLLDAGGRVNEWVVTEKLGDTSKAKPGANGSDDVKVIDVKLTEPLVPKLVKRRARFWERYNCSELFVGTCILLCGFYDLLFAKKGYYIFLFLQGTAFLVVGFGYVGTLPHCNA

SEQ ID NO: 70230 - protein, 398 aa, Zea Mays
MEPRIGNRFRVGRKLGSGSFGEIYLGTNVQTNEEVAIKLENVKTKHPQLLYESKLYRILQGGTGIPNVKWFGVEGDYNVLVMDLLGPSLEDLFSCCNRKLSLKTVLMIADQMINRVEFVHSKSFLHRDIKPDNFLMGLGKRANQVYIIDFGLAKKYRDTSTHQHIPYRENKNLTGTARYASVNTHLGIEQSRRDDMESLGYVLMYFLRGSLPWQGLKAGNKKQKYEKISERKVATSIEALCRGYPTEFASYFHYCRSLRFEDPPDYQYLKRLFRDLFIREGFQFDYVFDWTILKYQHAQMTTAPPRAIAPAVGQSSGMAPVANNNRHSGTEEGRRSGWSGVDPTRRQAPPPVINAGSLAKQKSPVRPEASTSRDAVFDSFGTLKRIVKALVFRQAPLI

SEQ ID NO: 70231 - protein, 222 aa, Zea Mays
MLETMYPHGVNNFLDARSTLTLSSVYHFQSTRCFPFLDHQPLSYSSLQNPPSNLSNGGVENCHLLQSFSAIEDIGFDLEMHQGEGFLEGMLLDGWLLNLVRICGFVEDSVASWTLTNLLHSPNEKLQVSAADFWDGILSLDEAGEPLVNLGYFPSYSVLKRAMLSYGYLFDTSGTKASISGSTAAGGPDDSLPHNIIAWLRVVSACCKISNKNLCFCVHLVL

SEQ ID NO: 70232 - protein, 608 aa, Zea Mays
MEEVQNCVMKLRSNPRRHRDKVYVGCGAGFGGDRLMAAYKLLQRVKELNYLVLECLAERTLADRYRIMVSGGKGYDPRVKEWMSLLLPLAFERKVCIITNMGAMDPLGAQKEVLNLASVLGLEITVAVAYESSFETQGSPVLSDESTGGRGGCSTYLGAASIVHCLENYKPHVVITSRVADASLFLAPMIYELGWNWNDTQLAQGTLASHLLECGCQLTGGYFMHPGDAYRDFPFEQLLDLSLPFAEVSCRGEVIVSKVVDFCNVQFHQISKDKVSCDGAKPSNACCPEKLLQLSPTESGWKGWGEISYGGHQCLKRAQAAEYLVRSWIGERYPGINEKIVSYVMGYDSLKAIGGDEDSYLAKQVLDVRLRMDGLFELEEHAVQFVEEFIALYTNGPAGGGGISTGHRKEIILQKMLVDRENIFWRSHAKKASIPCLHNQATYSETGQARISQAQRNPTCRTMAIQHFEASTETPASPAPALPGKRVALYHVAHSRAGDKGNDMNFSVIPHSPADIGRLRSVITPDWVKNAVSPLLGSSSFPDERDVQHRNKLLELVTVEIYYVPGISSLNVVVRNILDGGVNCSRRIDRHGKTLSDVILCQQVILPP

SEQ ID NO: 70233 - protein, 355 aa, Zea Mays
MSSSRFSPALQASDLNDFIAPSQDCIISLNKNTSSSSRRPQNKQKETTVSSKPPEEAVKISLKDCLACSGCITSAETVMLEKQSLGDFIDRINSDKAVIVSVSPQSRASLAAFFGLSQSQVLRKLTSLFKSIGVKAVFDTSSSRDLSLIEACNEFVSRYQRSQPSSGQEAGANLPLISSACPGWICYAEKTLGSYILPYISSVKSPQQAIGAAIKHHVAERLGLKPYHVYHVTVMPCYDKKLEAVRDDFTFSVDGKEVTEVDSVLTTGEVLDLIQSKSIDFKTVEESSLDRLLTNVDEEGHLYGVSGGSGGYAETIFRYVAHVIYKREIEGPLDFRILRNSDFREITLEEPAECC

SEQ ID NO: 70234 - protein, 471 aa, Zea Mays
MLPAVAAASPGLSHLPRYHHLGRRFHLRRHRLLPAIPARLSCGATHARRLLLAGAFAKGEGSSGQDVDHSAGATNSGSAYLGLFVRLLGLDNDTRDREHAVCTLYQYSLGGRKSIDEIMQFPGCIVLIISLLKSESILACEAATGLLRNITSVHIYRKMAGESGAMEEIINLLCKSTITPKILEQCLCTIWNFSIDEKWRYKVLKSDVLMKIVGYLDEEDIQVKEAAGGIISNLALSSSSHGALVEVGVIPKLVHLLQTKEDDYKIIRKEAKSSLIQLATDDCYYSLIIEEGLVRVPLVGSAAYKAFKPLPHSWPSFPDGSKIQRSSHPSKYGATELLLGLSVNENDTKPDEAKINAMIGRSNQQFLARVGAIELDDQGQEESGSEKNDMYTILPWVDGVARLVLILGLEDVSAIKKAARAMGDASINEHMRTSFKEAGAVKPLLQLLKHKDVHVREAGAYALEKLCVSLP

SEQ ID NO: 70235 - protein, 185 aa, Zea Mays
MAGLGKAMYAVGFWIRETGQALDRLGCRLQGKYFFHEQISRHRTIMNIFDKTPHVHKDAFVAPSASLIGDVQVGSGASIWYGCVLRGDANIIQIGSGTNIQDNSLIHVAKSNLSGKVFPTTIGNNVTVGHSAVLQGCTVEDEAFVGIGATLLDGVVVEKHGMVAAGALVRQNTRIPCGEALCSGD

SEQ ID NO: 70236 - protein, 198 aa, Zea Mays
MEPGAKSEAKQGEAGSGAGESGSGKVYHERQRLQFCLLHALNNLMQEKECFTRAELDGIAGNLVLNDPNKGQWTPLPFIFKPHHNVITGNYDVNVLITALEARNKKVVWHDRRKGASSVDLNAETLVGLVINVPIRRFRGLWTGRHWVAIRRIDGIWFNLDSDLSEPKQFKDQENVIGFLDSVLSQGGELMVVLQEIS

SEQ ID NO: 70237 - protein, 51 aa, Zea Mays
MAVGPPRHGRRSSFLQDVQWWSLKRILCSSVAISTANYQIITNWHSMASTS

SEQ ID NO: 70238 - protein, 89 aa, Zea Mays
MAGLAGRPGSWGGLVLRVGQALFAAACIGVMGSSLGFASYTAFCYLIASMGLQMLWSFGLACLDGYAIRANKDLTSPILLSLFVVGDWH

SEQ ID NO: 70239 - protein, 1263 aa, Zea Mays
MVMSESDDDDDEPQLNAVESYYFVDSTNDNEPVCFSTLPFLFGDTDDLPDCKKRLVLRGTGGDPGVKVYSEVVAWSLGLEGKQPQFAVLTAEGRRWVRLVRPLNSYEEMIRTVLITAHMLHFLMRKPHEPERTLWNHLCKVFNKFDVRPSEDDFRNHISLMKQFVAKDPILAKSEILRVFVEGKSGKIFTEAGADHIDVKQPFITDDEDIDEMIVEDADNESDEEEDGDLFDSICAICDDGGDILCCDGPCMRSFHAKEGSGEDSYCDTLGYTEAEVEAMKLFLCKNCEYKQHQCFICGVLEPSNGAAAKVFLCNNATCGHFYHPKCVAQQLHPNNIDEASELEKKITDGFSFTCPIHWCFHCKGLEDRTQGPLQFAVCRRCPKSYHRKCLPREISFDEIEEKGVIIRAWELSKMILIYCLNHEIDSELETPVRDHIKFPRIEKPLQFVKKGANLLPKKKKRTYSESILEQPPKDTVKMKSKVRMQESEQNKHDTREVSVKSFTQNVVDTPVKKKGKLKENKQLPYVAKDHFVSSPKSVKEQEQELVPLPLSGIRKSSFPKVDSEIEKRVISILGNEISSLTIKDVTRNCSLPSTHVYSGRPTDKMPLGKIERSVQAVEAALKKLKNGGSVNDAKAVCEPDVLRQLARWHTKLRVYISPFIHGTRYSSFGRHFTKVEKLVEIVDRLHWYVESGDMHHFCFEKRDWMTVQPNELPRGSQLIMGLNPPFGVKASLANKFIDKALTFKPKLIVLIVPKETKRLDKKKIPYDLIWEDSECLAGKSFYLPGSVDLNDNTVEGWNASAPPLYLWSHPHWTKKHMQVAEEHGHTCMGKIASHVEKRNLSDDLPVRKQSEAANKWNSRSGKETTCNDRKDNLLDDVTAKKQAGPEEEKETLGKMDHHVKKATIPDSLTVKKQTEASSKALSHCGNDRKIGRYSSRKYDDWRSKRTPDHEESFPPEKQVEVAYEETKVIIPSKKITHNEQSGACRENRKNSCVEETKNVEYNYEQQTAAGMRFREGEDSDMSISPPSRPVEPFDMIAHPIGSLTKEPFDPVLNRGATHQDSYAVTKEEYLGQFKRKNDRTFTDIDDSSRMRGSSIEEVTRPYIAAPTSDPYSLRYRGDGSFYRHPSSEDLNTTGISAGYGQIGGDSYPQATGSQTHNTRMHGGTSDDNYLSARYSLGYSGSRFSQPASTVPAFGLSGASSQRGSVIDKYSYGLSGPTGPQDSGINRYAPPDDGTSTRSKSSLAEQQYPFGQSGSSGGEWPHI

SEQ ID NO: 70240 - protein, 56 aa, Zea Mays
MTWCIWRCRNNWIFNEIPPSVSECKAMFRSEIVLLCHRVKPILKEDIASWLLNLGL

SEQ ID NO: 70241 - protein, 286 aa, Zea Mays
MGALDVAKVVHGRQGWRLITCMWLHAGVVHLLINMLCLLVVGIRLEQEFGFVRIGLVYLISGFGGSLMSALFIQSSSVSVGASGALFGLIGSMLSELITNWSLYANKVAALLTLLLVILSNLALGLLPRVDNFAHIGGLVSGFLLGFVVFVRPHLDWLTQQQRSGGGGQGQQQAPPPVAAARKRKHRTYQYVLWLAAAALLVAGLTAATVLLFRGYDANQHCPWCHYLSCVPTRRWRCDGSPTTCTATTQENNTLSVVCEGGSNRTYVVAAASQDRIKDLCNQLCT

SEQ ID NO: 70242 - protein, 159 aa, Zea Mays
MLVSLFLTHHVNMAISGPNVSARDLGFPYPKAGTAKPTDVVVKFYVLYEKWRRGELLGSSSVARYLKSITHSNGTIIHPSGSERSLHASVDALSSCYVDKQGNKNFRVWVDRLVTSPIGTSNWLVRFDNWEMEGGVRYCCRTTLLLNNKVPKELEVQIG

SEQ ID NO: 70243 - protein, 212 aa, Zea Mays
MELPREDFLPAVVAFNTDAAFSSKDSLDGGDFSAPLVLTLCFMSLENLSNDAGREWALVGEDGVDLALVDFAFELTTSFLSERRPLSACFERLEFDLVSWGFLLSVPLLLGGALIFSNLPCSFSSDRAPASLELPLVEEAWAALPLPRRKVEELVTTRSSGLPTQAWRPGTGLTPLRIGTGVAASRRSTWTNCPSWMTSLRMRSCCSSGSDT

SEQ ID NO: 70244 - protein, 905 aa, Zea Mays
MPSSYAAAAAGSSSRKPNRTSSAAAPTLRPPAPSPSPAPAPLAVNPSVISDSDPSSYSSSSADEADFAASDSATASVVSAYLSVAGEGADLSKVGIFLSSAARRRSPPCLICFDPIRPSDPVWSCSSSCFAILHLPCIQSWAHQSASGPAVPCPTWGCPKCRFAYPKSEIPSSYVCFCSKTIDPAPDPWILPHSCGDVCGRRLDANLDSGCEHTCLLLCHPGPCPPCPAVVPKATCFCGVHREPRRCAHQRYSCGGKCNKRLSCGLHHCPVDCHDGPCPPCAVLGSHKCECGEILEEKLCSERIFQCKRECGGMLDCGKHKCERGCHGGKCGECPLRGRRTCPCGKKNYPRLECDAEAATCGSTCEKVLGCGRHRCPERCHRGPCDGTCRLVVTKACRCGGLKKEVPCYQELTCERKCQRLRNCGRHACKRRCCAGDCPPCSETCDKKLRCGNHKCLSPCHRGACSPCPLMKTISCACGKTCFEVPCGTEKNQKPPKCSKKCNIPRLCRHKLECRPHKCHYGACPPCKLICGEEFPCGHTCKERCHGPISPPNSEFTLKPTKKKMGKHIECTPGTPCPPCKEVVLVSCFGQHLGQERTMPCCKWRPFPCENLCGNPLLCGNHYCTKSCHVLEVPLNHPEGDRTTSISKVNALAMPCEQCNLPCQRVREPPCSHPCPLPCHLNDCPSCKVLVKRPCHCGAMVHAFECVFYNNLNAKDQIKIRSCGGPCHRKLPNCPHLCSEVCHPGVCPSVDQCMKKVNTRCACSTLKQEWRCQDVLKEYRKSGRDPKEVPKSQFGVGLLACGEDCKKKLKAPDSELHLRKSQENKIPAVEVVNAPKRRKRRDRGQEVKISKFQEVKTFVLRALLIILLSIIVAAGLYLLWKGIFWLSDWMNEMEEQRASQSFAGS

SEQ ID NO: 70245 - protein, 245 aa, Zea Mays
MPHPGASPVLNNHQSSGGDFPSEWGGISSEEHDEAVMLEAAMFGGVFGRPMHPFSMPSHRSSTYYPQITHSSSPALAEQRLLREQQDDEYLASLQADQEKELKALQDAELHRLEETTTREVALKKQKQEQEERRKKQLEEEELESSLASKQASLPSEPPPDAEGAVTVVVRMPDGSRQGRCFLKTDKLKFLFDFLDIGRICKPGTYRLVRTYPRRTFTSSEGDVSFSDLGLTSKQEALFLEQITE

SEQ ID NO: 70246 - protein, 348 aa, Zea Mays
MDFGDDVMDGGSDAQRRKKRYHRHTPRQIQQLEAMFKECPHPDENQRMQLSRELGLEPRQIKFWFQNRRTQMKAQHERQDNCFLRAENDKIRCENIAMREALRSVICPTCGGPPVADDYFDEQKLRMENARLKEELDRVSSLTSKYLGRPITQLPPAQAALSMSSLDLSVGGLGSPSLDLDLLSGGSSGYPPFHLPMPVSEMERPMMAEMATRAMDELIRMAQAGEHLWVKAGGREVLNVDTYDSVFAKPGAASFRGPDVHVEGSRDSGLVFMSAVGLVDMFMDSSKWTEFFPAIVSKARTVDVLVNGMAGRSESLVLVVEQQLPPTNASLVSLVRTGGVCLGDIAHH

SEQ ID NO: 70247 - protein, 181 aa, Zea Mays
MLILVIKMPMSPPPSLSCLPLCWLAGSTVRRATVCAVLKRSHHHRASLRRCSPGIRSTSPPWDLPRLQTVFAAAQPSSTSTLSTKPLALQPRRVTILQALSSTHLGEGHRPLFHCALGISFLVHTDTTLWSCALHRTLRHLPLFVTSGLCRHPYFVGCQLCWLCSTSSHVTIVPFIRSKNT

SEQ ID NO: 70248 - protein, 695 aa, Zea Mays
MEVLCIGTADTKFEELLFLAAQLRSALAASGSDSKVQVSIVDVSTTEKTTANDFKDIIFIPRNTILSCHLGVDQHNLPDNRGEAIALMSKALQSFLKKRYDSGMLVGAVGLGGSGGTALIAPALSVSRVILSNAAAAFAGMVHGILSASNESDETSTKPTVGITMFGVTTPCVNAVKDRLNKEGYETLIFHATGVGGKAMEDLVRGGFIQGVLDVTTTEVADHIVGGIMACDETRFDAIIENKIPLVLSVGALDMVNFGARDTIPLAFADRNIHVHNEQVSLMRTTVEENKKFARFIADKINKSSSKVTVCLPQKGISAIDAPGMPFYDPEATSTLLGELNTLIQRTDIREVKLFPYHINDPEFANALVDAFLSMDVQASSSAQPKQDLNIGKSCSGQKISDSSIIWRTPVDFPDAKPEILRRTRSILHKLKEQISDGTPVIGAGAGTGISAKFEEAGGVDLIVLYNSGRFRMAGRGSLAGLLPFGDANDIVLQMANEVLPVVKGVPVLAGVCATDPFRRMEYFLRQLETIGFCGVQNFPTVGLFDGNFRQNLEETGMGYSMEVEMISMAHRMGFLTTPYAFNPDEAAAMAKAGAHIVVAHMGLTTAGSIGAMTAATLDDSVLRVQAIADAAFGVNPDIIVLCHGGPISGPLEAEFVLKNTKRVHGFYGASSMERLPVEQAITNTMREYKRISLK

SEQ ID NO: 70249 - protein, 93 aa, Zea Mays
MLTASLRPVQPTATTTSSCSLSSPTRGVSGAAPDEIAGGLMEIPVIYEALGDLDEAQKLLHRALRRGLIEGVEHCCRCCGTNGRSVLHGGRWG

SEQ ID NO: 70250 - protein, 55 aa, Zea Mays
MPVRPTTTKSLRYGVEISQWPLTRVRGVFLSTGVHWNRGNCSPEQFWHPRSAQRR

SEQ ID NO: 70251 - protein, 94 aa, Zea Mays
MKVDLVYGVASRVHGFRPKSLGGLELSKHRPCHVNERPVLPFYHTILLWCVWSRELVLDSFLLKVLLHLKVLELGPVVAPYLLHLELKLILSSP

SEQ ID NO: 70252 - protein, 54 aa, Zea Mays
MRAMRRRAAAAKARRQGVDERGSRRRHPPHRRQPPLRCQASIQLAHTMMRSSKE

SEQ ID NO: 70253 - protein, 935 aa, Zea Mays
MAMAAAVLEEALRWGGGSVGDDNVAARRAEEAAIRRHEAASWLRKTVGIVCAKDLPEEPSEEEFQLGLRNGIVLCNALNKVQPGAIPKIVGVQSDTAVPADGSALCAYQYFENLRNFVVVIQDFGLPTFEVSDLEKGGKSVRIVDCVLALKSFSESKKTGRQAACKYGGILKPLVSGNYFILKNCDAFMNKNARIHTEEATLNGFRGEQNLSLDCSPESYEVITSDNLSTIIRTILLDKKPEEIPLIVESLLNKVIQEYELRFANQNLMDEEKQNNLTTKEEASFAVNGSNAAQKFHLKAEINFDLQHKQIKGLRGTVSSIKSGMEQLKLHYSEEFTKLGKHLYTISNAASGYHKVLEENRKLYNQIQDLKGNIRVYCRVRPFLPGQISSLSSVAGMEERTITIMTPTKYGKDGNKSFTFNKVFGPAATQDEVFSDMQPLIRSVLDGFNVCIFAYGQTGSGKTYTMSGPKVLTEESLGVNYKALNDLFNLQAQRKGTIDYDISVQMIEIYNEQKGLAVPDASIVPVTSTSDVVELMNQGQKNRAVGSTAINDRSSRSHSCLTVHVQGRDLTSGTVLRGCMHLVDLAGSERVDKSEVVGDRLKEAQYINKSLSALGDVIASLSQKNTHVPYRNSKLTQLLQDSLGGQAKTLMFVHISPELDAAGETISTLKFAERVASVELGAAKQNKEGSEIRELKEQIASLKAALAKKEGEPENILSTRSSPSIYRIRKGNATPATPKDRQPMEEVGSLEVQNVFTPAQKRSKMHLLGILTENNSSNSVQNCNVPQKEIGLGGWVDKMALGDNHFENSNSILELEPDTAQLPTSFYHQRYSPVQQSCRTESVPSLGLHGFDSATSCSNQEIVVSTMGLKASGVANRGASTVKKYEATSTRSTNLASKSPLLQKKLQTPTRNRNQLTSSTIGGRRTPNGKIGIAK

SEQ ID NO: 70254 - protein, 225 aa, Zea Mays
MSRFGRSGPPPPIRDTYSLLVLNITFRTTADDLFPLFDKYGEIVDIYIPRDRRTGDSRGFAFVRYKYEDEAQKAVDRLDGRLVDGREIMVQFAKYGPNAERINKGRIMEPVPRPRGRSRSRSPRRRYRDDYRDDYQDRDYRRRSRSQSRDRYARDSLSPARRSPSHSRSRSYTPDDYKRRGKDSSASPASRSPSRSPPRKTPPSPKRSPVRHNDDRSPRSRSPST

SEQ ID NO: 70255 - protein, 285 aa, Zea Mays
MESICRSCKFAVRTCGRVMGMTIGAMLEEIQTLYQQHKQSCFLYLSSEVIKIFGSDPSCAGYLTNLIQILFSHTVQLLRTIQDFTARPDIADDCYLLASRCIRYCPDLFIPTEMFQRLVDCAMAGITIQHREACKSILSFLSDVIDLPNSSDGGQYRKVINTIILHRGATLTRIMIAALTGALPSGRLEEVSYVLLSLSRVFGENMLNWARESINLIPPQALTDAERLRFFNTISDAASGSSLHTITDRFGEISDVCRRNKTVQDLVQSALRPHDLTFTVVPQQM

SEQ ID NO: 70256 - protein, 113 aa, Zea Mays
MLNDRLLNFVDIDLHDVKDAHKRFDKASLSYDQIREKYLSLKKGTRPDITTAIEDELHSARSSFEQARFNLVTSLSHVEAKKRYEFLEAVSATMDSHLRYFKQVPPCIFCLVV

SEQ ID NO: 70257 - protein, 550 aa, Zea Mays
MKKTLVFHRGRAPKGERTGWIMHEYRTTEPEFESGEQGGYVLYRLFRKQEEKTERSSPEEVDRSGYSPTPSRSSPDNLEANEEANTPLNKESPESALHESPIELPKSVETNGGSMTRWLADRNDNLMVTAPDVSHIPFHGHAAGVAKVDPSVGASGHLVNPHNGNDDYNKFVSDFTPILPLENAFFTDIQQGAFGFDGIMNPLDPLDAFLNQTLVDPDEHSSTTSKVQYDSDIPTEFENHWNMKVEPQDDQCWWANIGFEPDEPNPLLPCDTTDQDILSVDSGADSFNELFNSMEETGIIVRPQQLDSTVQPNHVFASQGNAARRLRLQVESREIITKDESEDEVSCVLTPDCLNDSVEESTAEKDVASDGDEAESTGIVIRSHHPAPRSSSESSFTQQGTAMQRLRLQSGLNKGQRPSTDDSSSCIIDEPGSQHKAEKAEIEEDASTNLAGSADDLPGNIHDDEQKNIPEHEAKSVLRLRKTSEEGNKDVKQESCLEPHVRAPMQKGGFQSYIIWLVLPVALLLLLCVGTYGWPYPAVRHPGIAKAAEK

SEQ ID NO: 70258 - protein, 164 aa, Zea Mays
MLRALGFGNDTLLYVASGEIYGGDSTLQPLRGLFPNFYTKEKLAGDDLNPFLPFSSRLAAIDFIVCDESDVFVTNNNGNMAKVLAGRRRYMGHKRTIRPNAKKLNVLFQTRNQLSWDTFSRKVQRVQRGLMGEPDDIRPKQDDFHEFPSSCICSRKPGNISATT

SEQ ID NO: 70259 - protein, 91 aa, Zea Mays
MESPPDQESTSPTWDLSYDQQRRRRRRARTRSSGTTDSSQKPWTKRTGRWSATAAGTPSARSSSTAAATTRWSAAATTRSGRTPTRRRTPK

SEQ ID NO: 70260 - protein, 347 aa, Zea Mays
MPSPESRLHPCSCAAPIPSASTLPTCTVHSTTQPGPHGGGGGGCVCDDGGRRSAPAAPGGAGGARRRRRLGIPLPRPPAPRPPPRSRPPRRPRPPQQRLRALRPCLRTVDALRAGGHGGHGLPASRCGKGEDCIGVLSKQFPGSTRVARLEARLFEAKGEWAEAERAYALILENNPFDQIVHKRKIAIAKAQGGMSIVIDYLNKYLELFMADHDAWRELAETYSSLQMYKQAAFCYEELILAQPTIPLYHIAYAEVLYTMGGLENLQTAKKYYASTIQLTGGKNTRALFGVCLCTSAINQLTKGRNKEEEDSELQSLAAEVLLKNYKQQAPSKAPLISSMLKNMKLS

SEQ ID NO: 70261 - protein, 302 aa, Zea Mays
MAKNMGFPKLEVGLSAMSKDDLADSLAYNSLKGSILSNVLRAQKNAEDESCQIVLSNLRSEVIRLRNKAAEKDKILLSLVDRVKKDDAKFNARSEVHKVEVENLQNKLAEANENFELAKVKQEISEWSNAMLEKNVEELRESKERCFEKSLDCVRKLKTSFAKVGAYSSKEKFIRGDPEGIIDWIGEEAEAFEDILSDHGDICAFAGAWGVAAILEKAGCDHVKAVAQTETAFSTDDTKDPSAEATLVGGKFYSDVWVNGGREMTNKIIKKNEKETHDAQEEAKRAEEAAERARRIGIIFEF

SEQ ID NO: 70262 - protein, 1044 aa, Zea Mays
MAPAAAVIGAGDSDRLAREVARVLDECRASHAVQPRKLRELAALRSSSGGGGRLFIAAFHVAVTPLFALARRSAESDRVARFISAFASASASSADDGGNGFLEEFLRFLVTASKAAHRPARFRACQIISEIIMRLPDDAEVSDEIWDEVIDGMKVRVQDKNAAIRTYAVRALSRFAVEGEDGGIVDLFLETLDNEPNAEVRKTIVFSLPPSNNTLESVVESMLDISESVRRAAYSVLATKFPLQTLSIKQRTTVLHRGLSDRSASVNNECLKMLKDEWLVKYCGGDVISLLRFLDVETYESVGESVMAVLLKDGALRVQDGHSIRQYFTANAERDSNIQLMDAEVALYWKIMCKHLQAEAQVKGSEAAATTGAEAAVYASEATDKNDLLDSVLPSTITDYVDLVKAHLSAGPNYHFTSRQLLLLGEMLEFSDTMNRKIASSFLHELLVRPLEHEVDDDGNQIAIGDGVSLGGDKDWAKAVAELAKKVHSSVGEFEMVVSTVVEELARPCRERTADFMQWMHCLAVTGLLLQNTSTLRNLQATAIEPSELLHSLLLPAKQNHVDVQRAALRCLCLLGLLENRPNAELVKQLRLSFINGPDLVSAIACKALIDLVTWHGPQEIDRAIGIESPDPSYEKSQFTQVDLSDMNDDDLNIGVLDILFSGFHKDHWEFDLEGDNHDNVPTILGEGFAKILLLSGNFASIPADLHTVILAKLIKLYFSEETKELERLKQCMSVFFQHYPALSDKHKSCICNAFVPVMKAMWPGLYGNAGGSTHVISKRRKLAVQASRFMVQMVQTQLFSTESMDQASKSSESASGLADASNNFDISEEGLAIRIALEVASCPDKKTAAGKAYALALCKVVVLLRFRQSEQKAIKCMRGLVNHLAASVASDKELGKELAQMAARLRSLDACPDEELAQDDADAIFKKLGFDDGFKLDTNQAVPPTPAPRSVRPPAPARRRARQAPSSSDDSDEEAGEADVPATSASRVPATPSMTAAARSQRASKTAALSKMSAKPATASDDSELDGQSDVTSEEDASDEESL

SEQ ID NO: 70263 - protein, 202 aa, Zea Mays
MEDLGIEAKEAAVREVAKLLPFPELLSSIASIKYDYLTRQQINDAQLSTMVADQVEQAHAGINALALSQITINKLRENFIDIDKLCQECQTLIENHDKIKLLSNTRNNLNTTLKDVGGMMSISVEAAAAHDSLSNDQELIHTYERLIALDGKRRFALAAAASHKEEVGRLREYFEDVDQTWETFEKTLWGHITNFFKLSKER

SEQ ID NO: 70264 - protein, 257 aa, Zea Mays
MLEGELLHMRCCAHILNLIVKDGLQVIQPAIAKIRGSVSFWTTTPKRVQKFEEIAKYCKVPIDNKFGLDCKTRWNSTYKMLSVALPYMAVFNRAARVEKLYDCAPSKEEWAFAREVIDRLKMFDDITVLFSGTNYVTANVQLLKICEAKTKMRQWGTCGIHIIEEMTTRMIENFDKYWKAIQGPMAIATVLDPRFKIDYLYGFFETLLGQSSDLCGKRVDEVKASLCDLMREYQLDGDEDNSESAAPSLDSSGFCLL

SEQ ID NO: 70265 - protein, 333 aa, Zea Mays
MAAPRHRQGHIAQCLGRILACRGSATAAVAAGPGGRRLTGAEFVDGVRSLAAGLADRGVRPGHVVAAVALNSVEYVQLFLAVTYAGAIIAPLNYRWSFEEAAQAVELVRPTAFAFDGAFSSWALRLMEGDRFPSIGLYLLLGDPCRTGRAAAAVPITDVTGSLGGATAAAAMEPVSAPDDIALICFTSGTTGRPKGVAISHTSLIIQSLAKIAIVGYGEDDVYLHTAPLCHIGGVSSCMAVLMAGGCHVLAPKFDARSAFAAIQEHGVTCFITVPAIMADLLSYARKEEMAPGCGRTTVTKILNGGGGLPLHLVNAASQSFPRAAIFSAYVAL

SEQ ID NO: 70266 - protein, 67 aa, Zea Mays
MFHSLQLTQEAQEIVFGDSDKSKGFDEYMNLVLEDAEEINVKKNTRKSLGRILLKGDNITLMMNSGK

SEQ ID NO: 70267 - protein, 526 aa, Zea Mays
MNTVCEVCGDIGYRQLLLCCRDCKRCAVHQYCLDKVVYEASLIKWFCYECLQRRGEVTRISSLEKLSSERPLSQVHSRSPVQQLITKSVESVRDAGPWRDRKNESIATKYPSLNRTYPSIKKHTKKKPIVKPMGNCTNRKVRMAKVTTHTSAEASRSCETIGTESSKSNHGKNQQVDHANPVALNTEQSFPLIVNSLGTLGDNHQYHLLETTEGLACKFKKVPQSLAAPLKRLEKRDNVVLGSNNLGSSCFTADLGSSVLGKSGDKSNRMKDIGANLSSKHNDHGNQANQHTLVGSKNMEGKSVKAKHTVVDAHKNTSWTVDSLINVKDKSEVYGDSNRDILNDVTVQLDHRASNELLPRSTATNIPQLATLENDVVDTVMPYSPNGGCEESFSCPGIKNTPSVRERSVDPINISSDSHDTIEASESSERFMECQKASLCRRRKTVKMAMVSSSSEESGEDTISENVSLGYVLACRSSLSKAQKKRVTKLIQEIQPEFTVFISIMRMSNVKLPGNYQGICNCTFPR

SEQ ID NO: 70268 - protein, 929 aa, Zea Mays
MDFGFAASTGPDASEGPFPHLDSRMCMLLAIIPLSIATIVKEEAGNLKGETTSVIRGQLVSSLQILRQFFGLLSPPPATVHLANAAARKAAVVLSNLKTGSENMYSSFKDSSSIKAVGNMLHLIVEACIARNLIDASAYFWPGYVVPLKESSPVQASPWSSLVEGSPLIELKDALMVTPASSVEELEKLYSFAVSGSPEEKLAASKILCGASLLRGWNIQEHVVQMVLKLLSTFLPLDSGSEGRYVQHMPMLHALVSGISSIDTVHILSLYGLVPEVASMLMPLCENFGSLPPSDHRSCKLEEASVYSVFSCAFLSLLRLWKFHRPPIESALSRRGVSVWSELRLDFLLLLRNSHSSLKNLSNVTQSSIFELDPPFQKPLYIDSFPKLRAWYFQNQACIASTLSSACSRTTVLHVANMILKIICHNKVPKGGVLSVNPQSTANSTTSSSPAGVQEDMCQWPTLPAWEILEAVPFVLEAMLTSCAHGRLSSRDLVTGLRDLADFLPASLAAIVSYFSAEVTSGIWKPVMLNGMDWPSPAATLPVVESEIKEALAFAGVHINICPRPRSAMPMLPLPIAALMSLSITVKMEEFSHLHGIISQGIEICATSSSWPTMQIIGALWSQKARRWHDFIILTCSQSPFTRDNTAVAQLIRSCFSSFLGPLVDGRSCSVANRGVANLLGQSSDEKAHRLAVAPGFLYMRSCRLFPNNTFVCEEILEVVIERAHALANDRSSDRPARLRSECLPLSAASSLVEQIASLAATMLCHAGGVNLIRLLYEQIMPTLLLSGGEAKLGSGGMVCSIIEGYTLAYVLLFSGATVWGVGETSPAYTLIYTSKRQRVLDRHLEFMARVMEGNIVLGCGDATWRSYVLCFVNLLVSFVPAWVPEVKLNTLQKLASGLRRWHEGDLALSLLELGGAKTVTSVVESLLR

SEQ ID NO: 70269 - protein, 99 aa, Zea Mays
MPLGLTLGSLGRAMRQKRPSSLDILSSKRAPRDYYKGKNCKPTGFHTRKGGYVVVDEKLPRFAVPDNDSFQAEAVRVAVHQGPRSVDDILGLSNFSTDY

SEQ ID NO: 70270 - protein, 220 aa, Zea Mays
MDAQQQLDLVMRHQSMATVCESEDALGSSESDPARPARPRGKRSRAAEVHNLSEKRRRSRINEKMKALQTLIPNSSKTDKASMLDDAIEYLKHLQLQMLSMRNGLYLPPGNLSGAPETLAPLEMCAALNQSGAKASNSGVVVLPGNKIPVARLLLDPPNHDQRHENPLVLQSVPSSSTAVEPRFLQQPAQPNLQSFQLAVPPEVNRNPFVMSRICNPNSE

SEQ ID NO: 70271 - protein, 591 aa, Zea Mays
MTQVKPAPGGRMLTVLRVHLPSEIPIVGCEITPYVLLRRPDGGVFTDDVSETAPVDGYFMRYKWYRIQSDRRAAICSVHPTEQATLQCIGCLKSKIPVAKSYHCSSKCFSDAWQHHKVLHDRAISALNENGTEDDELFGRFGSGSSSSGVISAALSGSTSNLSLSSGVNNGPTPVYPTGTEKSSGETWFEVGWSRTYTATTDDIGHVLRFECIVVDVETRGTVRAPTSVMTSRVIPAPTPTPRRLIPVNAADAMVHFDLDSRTSSFGTFTVLSYNILADTYATSDTYSYCPTWALTWAYRRQNLLREIIGYHADIICLQEVQSNHFEDFFSPELDKHGYQPLYKKRTTEVYSGSPQAIDGCATFFRRDRFSHVKKYEDNIALIAVLEAKFSNHGTENPSKRQLLCVANTHINIHHDLKDVKLWQIHTLLKGLEKIAVSADIPMLVCGDFNSTPGSTSHGLLARGKVDHLHPDLAIDPLGILRPLSKLTHQLPLVSAYSSFVSMAGVGYDLDHQRRRMDPGTNEPLFTNCTRDFTGTLDYIFYTADSLTVESLLELLDEDSLRKDTALPSPEWSSDHIALLAEFRCKLRVRR

SEQ ID NO: 70272 - protein, 161 aa, Zea Mays
METPTPRVKPGFNGVGVGMGSSVNGSSRRAGYYMGPAGAVAVAGGGRAAAAAPVDGCSVALRVFVLAATLVSAVVMGVDRQTSTIRITVTDALPPLELLRGGERHGVPVLGGGAGGLPEPRRHGARDGGRPAGAGPALLGRGSRRGVRHPGRARQLARPLA

SEQ ID NO: 70273 - protein, 53 aa, Zea Mays
MTTATRRVKTRSSKGEWVQRLDGRCEHARNPMDESECTAETTSRRASANASQE

SEQ ID NO: 70274 - protein, 508 aa, Zea Mays
MSTEAYRAKHEITIIGNESPAPFMTFQSTCFPSDILREVLQAGFSAPTPIQAQSWPIAMKGRDIVAVAKTGSGKTLGYLLPGFILLKRLHHNSREGPTVLVLSPTRELATQIQDEAIKFGRSSRISSTCLYGGAPKGPQLRELERGADVVVATPGRLNDILEMNKVSLRQVSYLVLDEADRMLDMGFEPQIRKIVKQIPPRRQTLMYTATWPKEHVEVIPHMEKSRRLDQILRSQDPGSKIIIFCSTKRMCDQLARNLSRQYGASAIHGDKSQAERDSVLNDFRSGRCPVLVATDVAARGLDIKDIRIVVNYDFPTGVEDYVHRIGRTGRAGATGSAYTFFGDQDSKYASELVKILEGANQSVPPQLKEMALRGGYGGRSRRWASSDDSYGSQGYGAKRSTDSFKNSSFGNQAGGGSSFHSSFHNSSSGNQFGDTTSFHASYGNSSQNNQTGDNPSFPPSSSNNQSGDGLSFHERFYGSRGRDESRSNNDGFRARSRSPGKPVEVSNW

SEQ ID NO: 70275 - protein, 189 aa, Zea Mays
MEKASGHSALRHKVSNPAKPPVDISDRMIGDTKGSKLKHTKFQKHSYCLLPQATLTSMVLGFLGSGGGSFSTVTVSTPSLHTVSHRAARRGGQSRWQTMGAMGAELRWMVLNVHDKKMCGAWVSVLRVRRSVAIRKMQLQLLWTRCKVMAVLIGHPTQIWSLNTRQVICLSFVDGLFAWLLLIELELHL

SEQ ID NO: 70276 - protein, 334 aa, Zea Mays
MLSSELVFSQQPTVLQVDLMRRHCFPVYWNGENRRVLRGHWFARKGGVDWIPLREDVSEQLELAYNCQVWHRRKFQPSGLFAARVDLQGSTLDLHALFTGEDDTWEAWLVFDTGPKLGSNTIKLRRGFSPSESASTKPSQVPVGHLVFMVHGIGQRLEKANLVDDVVDFRRVTANLAERYLTSYQRSTQRVLFIPCQWRKGLKLSGESTVEKLTLDGVKGLRVALGATVHDVLYYMSPIYCQHIIDSVSNQLNKLYMKFLKRNPGYSGKVSLYGHSLGSVLSYDILCHQESLLAPFPTEYLNMETSDRSQGAKSANEVALHDSALSHHVCSRIH

SEQ ID NO: 70277 - protein, 72 aa, Zea Mays
MPPSSSSLQQGQLQPQQPAVRNPAISEREKKKRQTDVRRSRAARRQTPTAPTNLLDRSTPCVLQYITVKSDM

SEQ ID NO: 70278 - protein, 362 aa, Zea Mays
MGGTGASSRRRWARRSFRTAGGGGGRGTGGVVRRTVAASTTMAPRGTQGFAHVDKQQRHVHGVLSDFRCNSGSTDHLSLYVEEFKHKSSHRSSVRCLPSAQGNVTEISRMQPVARKVQVDMTFNDKGLCRASRTVSGMRIQPKYYISSPNNNLKNSPTVKSYSGMSDFNYQLVRSAKRSALPKMGLTSTNCSLSEKMSFLRRPRHGDNHQNQSRISALNRRNKIVNPRGAAHLLSKDKVHEHLNSSLERHSQALLSNALIREKQLCCSDILNQKEPEQLWSSAYSESEKMLCFSSSDSIDDLQVSSSSDTSDSFNLSSLGVIDGDEWNTTFKRISNSDLSLAHLHQGRLLQRQVIFAELVSV

SEQ ID NO: 70279 - protein, 125 aa, Zea Mays
MGADRLADGLLGCSSSPTLCSAARARQTVVPLRRSAARPASRPARLLLQTAVLLPLPACPVSRPAGGSRLQGAGCGCLSRPAEAPTRPAAAVSLLPACFLLALVHYFISYYVISCLTTECLSLSA

SEQ ID NO: 70280 - protein, 66 aa, Zea Mays
MRPDSECAATAGPCRKMFHSAGGEEVIDRPSLSRNDIIIPVLVPTEMCARWLLASALPPATCKCHG

SEQ ID NO: 70281 - protein, 476 aa, Zea Mays
MELLSGGALAWQQYRALLRKNATLTWRNRRSAALQLFSSLVFIFLIFCIDRAVRSRFSSTTAYRNVPDPEALVAPPIPPCEDKFFIKSPCYDFLWSDGGSARIRGLVDAIRRNNPGRPIAPEKVLGFRTPDDVDAWLFQNPMRCPGALHFQDINATQIKYGIQTNSTPVARRGTYEDPTFKFQIPLQVAAEREMARLLIGDPNFSWTVGFKEFAHPATETFSTIAQAGPTFFLAIAMFGFVFQISALVAEKELKLRQVQTSLTTVCLHIFMLKFDFFLHNNFGILFLLFFLFQLNMLSFAFMISTFVAKAASATTVGFAIFIIGFLTQLVTTFGFPYSSDYKKLYRTLWSLFPPDLFAKALNILGKATATPEDKGFSWNQRGECPSFETDCVITIDDIYKWLISTFFLWFVLAIYFDNILPNVNGVRKSVFYFLMPSYWTGKGGKMEGEASLAFLVQAVLQMMLPLLTRMSLRSKT

SEQ ID NO: 70282 - protein, 319 aa, Zea Mays
MTCIISVKVPSPEFEGQTKTRLGNPEVRRIVEQSVQENLTEYLELHPDVLDSILSKSLNALKAALAAKRARELVRTKSVLKSSSLPGKLADCASANPEESEIFIVEGDSAGGSAKQGRDRRFQAILPLRGKILNIERRDEAAMYKNEEIQNLILALGLGVKGEDFKKEALRYHKIVILTDADVDGAHIRTLLLTFFFRYQRALFDEGCIYVGVPPLYKVERGKLAHYCYDDADLKEIVNTFPANASYHIQRFKGLGEMMPAQLWETTMDPERRLLKQLRVEDAAEANVVFSSLMGTRVEYRKELIQKAASMINIDQLDI

SEQ ID NO: 70283 - protein, 348 aa, Zea Mays
MLRDEHGLFYALDLGGTNFRVIRVQLGGRDRRVVKQQYEEVSIPPHLMVGTSTVGEDVVAELSRAMERQGLDMKVAALVNDTVGTLAGGRYADNDVVAAVILGTGTNAAYVEHANVIPKWTGLLPRSGNMVINMEWGNFRSDKLPRSEYDKSLDFESLNPGEQIYEKMISGMYLGEIVRRILLKLAHDASLFGDVVPPKLEQLFILRTPDMSAMHHDTSHDLKHLGAKLKDILGVPDTSLEARYITLHVCDLVAERGARLAAAGIYGILKKLGKDKLLGDFSQQRTVVAIDGGLYEHYKKFSACLEATLTDLLGEEVASSVVVKLANDGSGIGAALLAASHSQYAEAA

SEQ ID NO: 70284 - protein, 1203 aa, Zea Mays
MESIIARALEYTLKYWLKSFSRDQFKLQGRTAQLSNLDINGDALHASLGLPPALAVDTARVGKLQITLPSLSNVQVEPIEVNIDKLDLVLVEKDDSENLSSPSSTASSPSATKSSGYGYADKIADGMTVQVGIVNLLLETHGGAHRQGDATWSPPLAAITFRDLVLYTTNEKWQVVNLKEARDFSNNKGFIYVFKKLEWQSLSVDLLPHPDMFADARFNSSSSQDDKRDDDGAKRMFFGGERFLEGISGEANITVQRTEQNNPLGLEVQLHITEAVCPALSEPGLRAFLRFMTGVSVCLNRGDIDPKAQQLAEAAGSSLVSIIVDHIFLCIKDTEFQLELLMQSLFFSRASISDGECSKNLSCIKVGGMFLRDTFSRPPCTLIQPSMQAVSQEPPPVPDFGQNFCPPIYPFGNQLLDFAAGVPLFSLYCLQTTPSPSPPKFASKTVITCQSIMVTLQEQSCLRIASFLADGVVPNRGAILPESSINSLTFSLKEFDLSVPLDTDEIARCSGTKNTNPQSSFSGARLHVEDLYFCQSPSTKCPLLNLDRDPACFLLWEYQPVDASQMKWATWSSHLSLSLETSSTSNGQRAVSDSNLWKCIELDDIRFEVAMVTADGGPLLDVPPPEGVVRIGVAFQQFKSNTSVEQLFFVLGFYTYFGQVAERISKVSNANKSESVKSSADKSENKLPSDTAVSLTMNNLQLNFLESLSASDVHMPLVQFGGGDLFLKVSHRTLGGAFAVTTNLMWTTVSVNCLEGESAIVCEHGTAVTGEHSILVHGNGHPKMRAVFWVDHRSKHQVKEPQFLDINITHVMPYDIQDMECHSLNVSAKVSGVRLGGGISYTESLLHRFGILGPDGGPGEGLLRGLKDLSSGPLAKLFKSSHLTEKEDERSKIDDHNSKFDLGVPDDLDVSIELRNWLFALEGTEEVGYLFSPRGGDGISREEKCWHSTFRNLHISGKSSDRLKLGGRRKVSPEKAFPVERFTAGIEGLQAIKPRLRDQCTKKGPSNNHEMGRDFNSSSSVGDHGVDVEATMVIGEDEIEGAKWTMDNIEAVATKEELEHLVMLCRSEADAMGRITAGILRLLKLDKSLGQGTIEQLRNLGSGGMDNIFSPRRLSRQNSFGSIGTPRTPTMQAIADVMGSKTTLEATISSLQGEISESKAKCMALISQASSTEDQNRAEDIRQLSEKLESMQSLVTRLRTLII

SEQ ID NO: 70285 - protein, 368 aa, Zea Mays
MLRRSPEHRPSAAELLKHPHLQPYVLQLHLKSHLSRSIVPVHQSPSEKRMTFAAEPVCRSKGRRNSLGSERMIAAFSKPSPDRSSVSSIRSVKDDYTATQSVRELSVDESMVEVASKPVASRTSDVMRTPKATPWKMMTTLRNRLEAPQASYDRTSHTEFSRTPVDKRNSRVARRASLPLPVFETPKQRSSMSVLERLESPDVSVNSPRIDRIAEFPLASCEDPLFSTVKPPTPASASASATPPFVDRSITKDKCTAQTLRSAAHDGGNGRSEDGGGLSSGRTTTTAASSGGTSGSLQPKGRFDTTSYQQRAEALEGLLEFSAQLLQQERYEELGVLLRPFGPDEMVSPRETAIWLTKSFKEAMATGL

SEQ ID NO: 70286 - protein, 481 aa, Zea Mays
MPPRCASPGAGGAACEPVSGAKKAVLLAGLYLTALGVGGIKGSLPSHGAEQFDERAPRGRKARSTFFNYFVFCLSCGALVAVTFAVWVEDNRGWEWGFGISSVAILLSVPLFAAGSSLYRNKLPTGSPLTTIAKVLAAAALARRRGGGGGGAQSSSNGAVIDRAPSPAGSADDMDEYCKSGDMEEISISDAASPAAEPSRELALLNRAVQCQPPRHGRRLACTVQEVEDVKVVLMVLPIFLSTIMLNCCLAQLSTFSVEQAATMDTRVGRLTVPPASLPVFPVTFIIVLAPVYDHIIVPFARRVTGTETGITHLQRIGTGLVMSVVAMAVAAAVEVKRKDVASRSGMLEDSGKPLPITFFWIAFQYLFLGSADLFTLAGLLEFFFSEAPPRMRSLATSLSWASLALGYYLSSVLVSVVNSATGRGGHRPWLQGASLNHYRLERFYWVMCVLSSINYLFFLFLAVRYKYRNAGVIKVMRTSL

SEQ ID NO: 70287 - protein, 125 aa, Zea Mays
MLCPHCPCSFPCCKLSGNLQLGLHHRLFACSAAPDRRVTVKLHALPCVAFRCCCSRVVIAQVLSALNLPPFCSPAVDSLLVSLCCHSSLSSSSPSTLPLLALNKLSRLACFLRVTSRVPLASSGS

SEQ ID NO: 70288 - protein, 74 aa, Zea Mays
MIGRVRPSYEREMWGTQRIERRWYDQGSTCFTHIHFQCDTQALAHVSPPISHLKRTQTLRGDTYTCFFEHIFSL

SEQ ID NO: 70289 - protein, 404 aa, Zea Mays
MITRVGCKAMIVVKKMNSGKWMVSKFEKEHNHSLSYSKMVPSTSNITSGEIVDLAAKGAHPSEVKNEGYSAGTQCNPADSLTILYNNLCQEAIKFAKEGSVTEEIYHVAVSALKEAAEKVAEVKRSRPTLSHCGFVRESKHDVLQEKSMSALQCSNQVELTRTSPGSRPLQDSASNLLLIPTDILTDSRLYSGVDTAPLTGGFPTNESESTHASESSFMHFKNTKKTSSEKSQNTCFNQLIHGKEQGIHGSSKDTMVAIPAIPLALCMPVTQSLPGSSTEGPYRLLAAPIEAVPISYCPAEPIRQTQKGICALGPFGGVLSELKNQGTVPKSIVHATALACGARAVPLEDAASLISAIESKIRSGGAIIAKLPSNNLAPLVPPAIAMSSSSEDDEEHDHSEPSQ

SEQ ID NO: 70290 - protein, 3801 aa, Zea Mays
MASSQHVEMEAAKLLHKLIQESKDEPAKLATKLYVICQHMKLSGKEQSLPYQVISRAMETVVNQHGIDMDALRSSRIPFAGGPQAGDSSGVMSKDKEVIGNQSPMVGSDASQSSGQAGLWQLPSGSTDMIRHGASISGRVPTGPNRGDFSAADIHQGSMSQKSGRSSGIESPASLQMEDTRSMNSHDSLKSDEKTSKKTSSKRKRMDSKGAGDLRSEDNSKSDVISTGQNTRKGKQVGKAGRQGQPSMGIEHEQQPHKLQGGTGQVPPIHGGAPFLRTRSEGPSGRTMDKTKPSNPFSMGQIPNFPEGLASTGAPIELQKSIQGGASLFNPGFGWNQNPQVQTLKNSQGSIHNLVRSGVTVEGKVNVGAQGAFNSASAPQMEFPTVPPYNPSSFGASSQFLDKGKELVSSIISTEPHSSKVASQPGISHGSPMQERQGMIRVPQRGEASFQERRPSSLPSRSTGPSPMSHISSNTPFKEQQLKQLRAQCLVFLAFRNNLQPRKVHLEIALGRGPPAESDSAGQRGSEGRVSDALGKENGSSRENSGVFCRQTDISRLPATSAGSIAEDDSLSKDPENATKKIKLAEQEKSLMEVENVQQASVMQGTSSEMRSQETASQNPYRPQQSYYQGDTRRIASDIHRTDAEILNQNLSWGGQGSTALGGTRQLLNQETKESLAPSKSHHMPVDGYNSNIQGIDRTPEIAGAGNDVENCSHVADIVPEQAADEGDEDLSEHEDLLSSPKHTMTEKWILDYQKRIYNEKQKRTLEQHKVHSRMSATYEELKESVNSSEDLSAKTKSVIELKKLQLLPLQRRVRSEFLLDFFKPNTSDLERIKSLKKHRHGRRVKQLEKIEQKMKEERQKRIRERQKEFFADIEAYREKLEDNFKVKRERLKGFNRYIKEFHKRKERIHREKLDRIQREKINLLKNNDVEGYLRMVKDAKSDRVKQLLRETEKYLQKLGNKLQSAKSTDGRSSFVTDKSDTANDIEDESYQPQHYLESNEKYYQLAHSVKETVNDQPSYLQGGKLREYQMNGLRWLVSLYNNNLNGILADEMGLGKTVQVISLICYLMETKNDRGPFLVVVPSSVLPGWESELSFWAPSINKIAYAGPPEERRRMFKEMIVHQKFNVLLTTYEYLMNKHDRPKLSKIQWHYIIIDEGHRIKNASCKLNADLKLYRSSHRILLTGTPLQNNLEELWALLNFLLPNIFNSSEDFSQWFNKPFESNGDNSPDEALLSEEENLLIINRLHQVLRPFVLRRLKHKVENELPEKIERLVRCEASAYQKLLMTRVEENLGGIGAVKVRSVHNSVMELRNICNHPYLSQLHVEEIEGYLPKHYLPSILRLCGKLEMLDRLLPKLKATGHRVLLFSTMTRLLDVMEDYLVWKKYKYLRLDGHTSGHERGALIDKFNDPNSQAFIFLLSIRAGGVGVNLQAADTVIIFDTDWNPQVDLQAQARAHRIGQKKEVLVLRLETVRTVEEQVRASAEHKLGVANQSITAGFFDNNTSAEDRREYLESLLRESKKEEAAPVLDDDALNDILARSEAEIDIFESIDKQRREEEMAAWQKVVQDGSTSGLDPGVLPSRLVTDDDLKPFCHAMKLYEPSNVKTVNVNVRKKGELGGLDTQHYGRGKRAREVRSYEDQWTEEEFEKLCQADSPESSQPGGMSKDLDILNKGIKTEILVESSKEPEQTKMEASPTVGDSPPAKRRRGRPKRSDVFVSPTAGLTDAVKQDTGTTQDGSSATPASTIHSDAPATAINSAVSDVNIHSIPPADTKKQEFSTDTKVSSSVSVLEGSVPNEIGTPLQSVHNVAVSAPPHQSARGRKCQAGETPRRRGRKPKSLSSSGVDDVSLNPTFSTVSGVADTSYVPSYSQVSSQGTAVALAGIQKDFVTVKLDTLLPDSGKGAPPVNEGDKGATVTTPVAKDICAGTVTTSDNTVTLTPNTLKENIGLVQVASAPSMLVASEELMKIAHVAVADKPVEKQTASRRRRKKTSSSEDTGVSTRQRSAMKRSYYNTSVAVDDIGSAVIPNEKSGITKERDVSSIQSTSNELPNINSPLYEKSGYDSQPSTPIAVPINEDTLPSGFDTCTNSMITLATSANSAEDDKPVDLHLNAPVSVDSQNQEQHMTGKDHLAVCSRIFATQLQTDTANPAIDHKPGTAQFEPSASLPQNSGKDATALPSEVDSAAPNRASSRRRKGSTREPRTRSNSASAASERRARLTGLKQAEDIKKLEMSATPTTTVCISSVEQQGAASLSAKITNASVSEGQKNPGNYMPSAISIPVGSHVLGLGATSIEETTATMITQAPAVSKSERRKLPGGSQQGIQFESSASKTKMVSAVEPAPANVECMQGTEVNSSEQTIVSATEPAPANDEHMQEQPTNIVSSVESEPSNDEEHTKHEVFLATTGDNMLASSAGTEILRDTVEHAACQPEAVCTDGTARQSELSQLDRKAFHDASYKYTHGSTKDDGILPSEGTSVDVTGSKQDDVNIVGTQTDDVSRGSSHFPVILQSTESDRPPGQVKNLESRMEQVKTEEALVNSSGGNQTHSLGDEPSHNTSLARNSPSEHSNERCSDQVIGENFKSKENIVEVHSGINTDGPDEALNALHTQSKEASMTDIGVPTDGDRCEGKGTSVEVCADMNTDGPVATQDASSTKSDKESCMMECGVSTDGCPTVCKTHNDLQGHVSCEETFVRTGGDDTTHITNANYGSNNESEATIASPVETTQKLMEGSTVIVSENSDLNKQCHTLHTRNDPPANTLLIVESNKVTCDAEIVCASRLESSGIEAETVGIQESALTDFEGTKGTGDLGDRTNSQLHDDVHGTSCSTIALVSEKEPSEDLTTGSHSEASNLLAAVEQTQETTVENQEIIDAVVFMDACKAEPVGDFTIAKGAEQTVEMVHYVDKQSAVLDYVETQTKRTSVCGSTLNESPQAAGLEEDCSVLKHGDPTSSELLTVAPNPIGETSVIQVEPEARNSDGYCTTEAGSALSETVMGLEPNKETAVPMQENIGEANDNFNNCEAHNNSEIHAFEVSMETQSSEVKEVSSIQSGAANLSTQTTALPDVTGQTSMASTGELVSTNEHIHMQGTEINSEQQTKMVSPAESAPANDEHVQDIVILSSEQQTKMVLAAEIDALCVQETAIIDLGGARGTVDLNDIRTQVPALPGRDVLDVEAHILEQKKTSSPGDEIKGSEQAKIESIAEIETVGVKENVIADHKETGIEVDAHVLEQAKMVSALEPDSTPEVCADKLEPSGADDVGMIVVQEAASVDDHNRAQGGEAHCSEQIKMASIAQAVSSMALVGYSSSEDSMVDAAARVTDADFVDSKAAGVYRQETMPTQTTSTLPENMDSPATAATMVESKFAASSEHVAGPEPIDETSVMQVELATSTGDGCAADGHNLVSSETVVEVKLAQEIVVPSPGGSIEANNTSTISEVYKDTQSRASGEACNDGQSHGDENMKLGEAYTELQLAPSSGEEAMTCMCSELPSQEVEAPSSDPLENNEETKNEAAAQGSVNEDSAPRAENAKIDEADTEQELLPSGEATVDESSELLSQDEKVARKDAKMEESAAAAAAQRQLTTEVAHASENAKLGEDGTELQLPPPSMVDISREQLSQEVEVASSGPSGTDETAEMKRLNTEHSPGDETSKLVGTDLGLQLSPSGDAMVDISNKPPSCQDVKEAPSSDILGNDENSDTEKTPAALHGRLNTELAPSGRNTEFSEADTGKQETPVSAEAMVESSSEPRSHEAKEAPTPDLSGDDEKAKSARAAVVAELFGDATEGGSDQPLPSPREQGKEAEADGGF

SEQ ID NO: 70291 - protein, 378 aa, Zea Mays
MAGSSVRGGSNCPPLFVTEKPTRMARYAYRLFASTVLAGVLLVWLYRATHVPPMSSGARWWAWLGLSAAELWFGFYWVLTLSVRWSPVFRRAFPDQLLRRYKEEQLPGVDIFVCTADPTVEPPMLVISTVLSVMAYDYPKEKLNIYLSDDAGSIITLYALYEASEFAKHWLPFCNKYQVEPRSPAAYFGTEASPPDACDRKEWFSLKEMHKDLAARVNSVVNSGKIPEVSKCKLMGFSRWSENASFRDHPSIVQILIDGNKRKATDVDGKVLPTLVYMAREKRPQEHHHFKAGSLNALIRVSSVISNSPVIMNVDCDMYSNNSGSIRDALCFFQDEQLVGPSLLGWMGWNVLLWHRMLPSERGSMWANIQSRLQGRLD

SEQ ID NO: 70292 - protein, 297 aa, Zea Mays
MMAPLSPRLVVPVDVKKLPREQKVPLHNRWHPDIPPVADVTEGELFRVEMVDWSGGRVRDDNSADDLKFMDFTIAHYLSGPLRIVDSEGVPASPGDLLAVEICNLGPLPGDEWGYTAILERENGGGFLTDHFPSARKAIWYFEGIYACSPQIPGVRFPGLTHPGVVGTAPSLELLNIWNEREKSLSETSLETIKLCEVLHQRPLAHLPTPENCLLGKVQEGTAEWHIIANEAARTIAGRENGGNCDIKNLSRGSRIYLPVFVEGANLSTGDMHFSQGDGEISLCGAIEMSGFLELKI

SEQ ID NO: 70293 - protein, 315 aa, Zea Mays
MSGKLTAEQLTKFTLYAEWLILSTWWIGDNWSSLMQSVGASEKVFRLMDLLPSKQLSSEGLKLEKLKGQIQYADVSFSYPSRPTVPILGGLNLTLNPNEVVAIVGLSGSGKSTIINLLLRLYEPTNGQILIDGVPLTELDIRWFRERIGFVGQEPRLFRMDISSNIKYGCPRDVSHEEVIWAAKQAYAHDFIMALPDGYNTIVDDALLSGGQKQRVAIARALLRDPSILLLDEATSALDAESEHYVKSVITKVSRDSKAKRTVVIIAHRLSTIQTADRIIVMENGNIVEDGKHIDLIEKGGLYSRLARRQNDDLK

SEQ ID NO: 70294 - protein, 518 aa, Zea Mays
MPEPQAILPLRALPPDAPLPFPVPAPFHPQAPGPGGTAPATPPNPTPPQPLTPAAPPSSSSTRPPHPWEISARAWLESFPDGRPPTEPEVDAYIDVHRPELPSLPRSQLHQRLLALRGDQVLDADQSAFPYRFQRTDLWKPVYQWLESLELDSLVATQQISDWLTSNPKIMDRMVEKHSKYHLIHYTQRMHLKMLKKKGKLPKTLQLSAARATVRPIAAPFTPEENIVPLQKTITPVTGRLPSASSGRQQSGTTGRFSSASSGRQQSCTPGRFQGGNATLRDKKTSLSKKKEALLKYELLTDLQNQLTAVLLKQCRTVAIKETDSSYVESPNPETNMSIQGTTTANASAPSEAKNVFINEQSVPAGATESEPGHKRKRNPIIVTPAWCYSEASAGTLQNEINPSSNSDVSRNFNIWRGHANPLVSHRDTKKNILFCLEGRETGVSCSQAASYGGYAGRNCERWTPFLEGWNSPAFQFEGPAVHVVRKSYLSWCPTSCAYTSSAPSAQPHGRVSAKFLM

SEQ ID NO: 70295 - protein, 464 aa, Zea Mays
MADEALDQPPDATPSPTPATPPVPATPSPTVLLRPRREAFEHGLLPIPKLIFPEGTLAQTLAQLKEKLAASAPDGRVRAAALAEALQIPQEQAALALATLAAVLPAEDPALGDGAVDGSAADIRDMLLFLYIQSYKRLVPRSAHKDSPVVADVWPSTSAFDGYLSALSPIQLVRSNSRRFMPSQADEEIHQLSYLQKHMANILTLLADSVEGDGDDSLVLTMETFEHLGFLVQFSEGTSLSQAATFFACSDPDMPDVPVPAAQVLDWMSQKIAFSLEYSAERSAAKESNQQTMSDLDVTMAEANTSHPRNSTPSANPAYYRNVTFVEGFSKTSVVKHASDVKGNSIKVLNCHDSVIYILAPLKYATVYGCSDATVVLGAVGKVVKVEHCERVHIIAAAKRICIANCRECIFYIGVNHQPLVLGDNHKLQIPSWFGDERQGTTNRNPFPLPEIYGTSQSKKISKR

SEQ ID NO: 70296 - protein, 163 aa, Zea Mays
MSRKKLLHNLEFMFALFSACGMTVKPICLKAFLLMLVLKREVSGRKPTPVNLEELCSVDLKNRTTLEDVCKILSISKSKLLKHIRQGDVKRHTNSIKPHLTDANKKARLQWCVDMLEHESLQVSPRFKSLFDHVFIDEKWFFLTRKSERYYLLPDEDEPLRTS

SEQ ID NO: 70297 - protein, 104 aa, Zea Mays
MADSKATSAVTLRTRKFMTNRLLARKQFVLEVIHPGRANVSKAELKERLAKAYEVKDPNTIFVFKFRTHFGGGKSTGFGLIYDNLEAAKKFEPKYRLIRCCCLL

SEQ ID NO: 70298 - protein, 1470 aa, Zea Mays
MEATSPHPPTTIRRNPPRRARPPPTPLAGDKSKPSPLSRLLEGEAAFAASVPCPPQEERLKVFLRIRPLPDRDRSRPLPAAKDPRRKPKQVGAPGELCLAPDGPNSVVLTVPRSKLVDPKRGRTEVFDGFSAVFPSDSTQHDIFAQVMNPLVDDFLGGKSGLLVAMGPTGSGKTHTIFGSPRNPGILPLTLRRIFNAQGESKVSRKPTRSFFFSMFEIFSEGKGERILDLLSDTVECVLQQSVIKGLQEVSLSNPADAESLVSRGMLKRSTAATNANSNSSRSQCIITIRADSEHLLSSAVLTIADLAGAEREKRTRNQGSRLLESNFINNTSMVFSLCLRSLLEHQKNQKKPLEKHFKNSMLTRYLRDYLEGRKKMTLILNVKPGDDDYLDTSFLLRQASPYMKIKYTSLDDSFDLASQKRINVSLICQENKKKRKVQKPAVLVVERKENVDTDDISKVSEKDGVHHVSLNPEMPRVSRSEAIMTNFARALLTVLRQYKHKLLESENAVESMKELIRDKDIEIMELKKELKAVRYCSCKSSPINEDDSVDHDDSSSFGQAAQSLVNISNQADLGSNDASEDNFHVELQALHKESDKSESFTVPTPAPTGGAMPASSYSDQSFTEDDALLCLNTEQTSTVGQSDEETEELSKITLENKDIQLDINIREEKHHESCSSSQQVNFDTEGTRSSEASLLGTVGSEKKLEELKQKSGRCVSAVEKANVELEHGIDGGQALDEKCDHASAKAAKAPPSKGREADETADTDKEAFGSRTEKTRRRLQPAAAMLLREFTGADIDADNEREERGRSSSSVATGRSDALVQLLMKGRPAHGDESRQLQSLMQLCEMRSIGSEDLLAAFVPILVGMLGQPATAGASPGVMLLAARALANLVYVLPSCSAISEEHAPNRLFASWNLPADASEFVMEAVPSLTNLLNHHDSKVLEHASVCLTVTRIAEAFAYYPDELDELCNHGLVAQAASLIALGNSSGQEPLSTSTYTGLIRLLSTCASGSLLAVKTLLLLGISGTLKDFLSGPALISGTLVPRAVTRPADQIFEIVILADNLLPHMPAIIIELPTYYHAYKDSSTNKSASIKQEGAGSTGNEKSGNERLLRDQPKLLEQFGMDLLPTMTQVYGSSVNAPIHRKCLSIIGKLMYYSSAETVQSLLGTTNISSFLAGILAWNDLQVLIPALQIAEIMMEKLPETFSKLFVREGSNTMARQVPPQDKEQLDKIISEMLSELSKVNGVSTFEFIRSGVTTALLDYLSCGTFGKEKSSRIGNGGSRLTSGLSALAQPFKLRLSPAQGEKPLRDYSSNIVLINPFASLAAVEGFLWPRVQHSEVASKPIIPSGNNSESVVPGTIAGASLATAMDQSGRRPTTRSKSSAAWGGTSKKDSHDESTTTAKGKLGDSNECNIGSASFSQVQPSSGSGARNTSSRGPDSTEFQSTSTFGSFVAATMAGLASVGGRSVIGG

SEQ ID NO: 70299 - protein, 101 aa, Zea Mays
MRQVPVQGHGAGRQSRGEQDGDHRRRQGPAGGGGRRHRHRLPRQLPAQEGRPRRHRQGGGGEARGEEAARGEGEGEARRGRAAALLLRTSQCLLESSLADF

SEQ ID NO: 70300 - protein, 1228 aa, Zea Mays
MERILDIEVLEAPREDSSSTEPRSKKMERYLIKWKGLSYIHCSWVSEKEYSEAANIHPRLRTRLNNFRRQKEAMKIEAERSGEDIVAIRPEWTTVDRILASRYTGKNLVGDREYYVKWNELTYEECTWENESDITVFQPEIERFNEIQFRRKKSGDKGKATREPRQFKESPTFLSGGTLHPYQLEGLNFLRYSWFHNKRVILGDEMGLGKTIQSIAFLASLFEDKFGPHLVVAPLSTLRNWEREFATWAPQMNVVMYFGAAASRDIIRKYEFYYPKEKLKKLKKKKSSPSNEDKKQSRIRFDVLLTSYEMINMDSSILKNIEWECLVVDEGHRLKNKDSKLFGQLKDYNTKHRVLLTGTPVQNNLDELFMLMHFLEGESFGSITDLQEEFKDINQDKQIEKLHGMLKPHLLRRFKKDVMKELPPKKELILRVELTRKQKEYYKAILTKNYEVLARRNGGHTSLINVVMELRKLCCHGFMIDEPDLEPANPEEGLRRLLDSSGKMQLLDKMMVKLKEQGHRVLIYSQFQHMLDLLEDYLSYRKWTYERIDGKISGADRQIRIDRFNAKNSTRFCFLLSTRAGGLGINLATADTVIIYDSDWNPHADLQAMARAHRLGQTSKVMIYRLVSRGTIEERMMQLTKKKILLEHLVVGRLTKANNVNQEELDDIIRYGSKELFEDENDESRQIHYDEAAIERLLDRDQVDGDESVEDEEEDGFLKGFKVANFEYIDEAKAQAEKEEARRKAAAEAENSERNYWDELLKDRYDVQKVEEHTAMGKGKRSRKQMAAADEDDIHDLSSEDEDYSLEDDISDNDTSLQGNISGKRGQYSKRKSRNVDSIPLMEGEGRTLRVLGFNHAQRAMFLQTLNRFGFQNYDWKEYLPRLKGKSVEEIQRYAELVMAHLVEEINDSDYFSDGVPKEMMRVDDVLVRIANISLIEEKMAATGPGKITNIFPNYLLYEFQGLSGGRIWKAEHDLLLLRGILKHGYARWQYISDDRENGLFEAARRELHLPSVNEIIGAQLNEGNLEGAQEGQANTTSMSHYKEIQRKIVEFLRKRYHLMERALNMEYAVIKKKIPVPDDITEQGVPAGHAPFIPDISELLRELPNLEPISTNELVSEGTAGQLQVPHLYNKMCGVLEESGAYALSSFFGDKSASSSLANSLRQFETVCENVVEALRPHQNGTGSAIKEELVDAATKAAAAAAPQQDSGHDAPHGQSSTAKADMEIDG

SEQ ID NO: 70301 - protein, 267 aa, Zea Mays
MDPDTVIRKLHKAGKPAQLWGATAKPAVATQLEKLQLKDAGGKGQGQPPKNAGGKGQPPKNAAGKGQGQGQKQQQPKGGAGGAGAGAKVVALPHSQPTPQQLMQMQQQMQMNGMKFAHPELMAMGAGRMPMPMPFPAAAQAQAQAAAAKDPKTVKFDLPGGEEFGDDGSDLDDEFDELDDVDFEDDGLDDDDDGDLYDGPGMVMKPMGMPPAAAAGGGNGNGGGKKGGGGNEVPVQINGNASNGGGAKQNGGGKSGAKNGKGRRMRA

SEQ ID NO: 70302 - protein, 1269 aa, Zea Mays
MPDATGLEMGLKGSKGAPVPGMEGGVAKAPASLEENKSSADEDLGRGPALTGKKRRDCRGSADEDRNVTKRVLRSDAMKLRAEAEAACVVAVEVSKTDSLERKRCEAIVEAEPCNSRLLMEVTCNGEEANELVNLDSSDVSEESARCSENNMGMPSVPATDSSQDNGLGTQSSLAESDIKTMKSDEKMSTATLSECNDSRAGMNSLSVDEAQDDKVRHGPCQGEVIDSAMANDAGTSTNLIKISPTSGSESVKQENNVVGTEEVILHSSDTKVEKHSHIDDVCTETEISLTDNGICAVDNHTDLTGCTKQEERGSPMNEANDVSSHDIVFTRRGRKSCEAKQRTCEEEARFEKRITRSATVRQREVSASSHKTSTNEAALEGRGRKGDIVAHYTRKVSSAVSPKGHHAELGDCNTSMPKQTVKETVVDRRDSGVPENDNHANVTENKESENGKEINLKTQPPVGIVKKTSGGGVSAVDQNVSGSAITERNDTEHTDSDGVKSENKTPVQKPLLSVGAKIVASKKRILEAELDKSTGRSPIALPSMKKTRNMSSGPEINQPDKSTGDKLIENNCDSGNKRVLRERQHRNQTNLSTRYSNHSNQNDMEQTQDQSDDDEISSDTSYRRTRSRRRCGAARLAVPKQEDSSDSEDFIAVKKNRRKRKKSVHKQRAGSKLKHTSGPSKAGRLGRPPLIKSESSSLSLQPGKGERKVPEGTGTLREEKQKISDQIKAMLLDAGWTIDLRPRNGRNYMDSVYIPPSGKGSYWSVTKAYYAFRAGMESEQQESPKDQSLSTKSVGSPDKRQVSSSSGYTLTEDILSKLKRVVVNKRTTKLEIQRLRQKRFKKEKKKKNVSNSRSLHLGNERKKRGGCALLARGSNKESGSSTDGFVPYEWKRTIFSWLIDLDVLSVNTKLKCMDGSHSKVLLEGFATRDGINCSCCNEVYSVLEFVTHAGSEVNKPYRNILVDGLDIDLLHCLINAWNMQSDVERQDFFPVSIEGDDPNDDTCGICGDGGNLICCDGCPSTFHMSCLGLEVLPSDYWCCANCSCKFCHEHSSDGAEDTADVDYSLHTCSQCEEQYHEACSPETDSITNLSSQTGNLFCQQSCRLLFEELQNLLAVKKDLEPEYSCRVVQRIHEDVPEEVLALDKRVECNSRIAVALSLMDECFLPIIDQRTGINLIRNVVYSCGSNFARLDFRGFYIFILERGDEIIAAASVRIHGTKLAEMPFIGTRNMYRRQGMCRRLVDGIEMNLWTPGHRNLDLVHLKILRSKK

SEQ ID NO: 70303 - protein, 383 aa, Zea Mays
MNMDKTPIAGDGGGDAGGGGGGSGNGPEMQSSLDAVAPSPTPHTELDISSMPDTPLRKPGHRRALSEIIGLPDDLDLGGPGAGDAPALSDENEEELFSMFLDVDKLNSRCGASESEPSCAMAGGPGEATETSAAASGAAQGQMHHHNRHSMDASSSIDAEHLFGTTVTEGVSPAEAKKAMSAANLAELALIDPKKAKRIINNRQSAARSKERKMRYIAELERKVQFMQREATALATQLALLQRDTAGLTVENGDLKIRLESTEQQIHLQDALNGALKSEMQRLKMATGQAGNQMMNFAEPPHTFGGANQQVFHHPGQAVPPFLVAMQQQQQLLLPHMNQPLHPLQSQQLHQAATLSIDMEGLPAAPPGQWQWGGDTWSESSSS

SEQ ID NO: 70304 - protein, 98 aa, Zea Mays
MPLCSLVVTQNGLQYSICRFLPRYTLWSLVGSLRRVLLFVVALFVPALSPLRFCPLDASSSHQLVSMPCASTSCPHAFFLSAACPHVFSPQQIVLVSS

SEQ ID NO: 70305 - protein, 372 aa, Zea Mays
MHHHVPIQVPSSSDLESILSPDPVCSDLQLKEINYNAAAMDESTELLHLILGGNDEGYNTTTELQVWDVLDFYVSENFSALQFDSLMGFTNEVSTSYNDCMNLVDMVEWPVARLSLDDTPKLSNSDDAVLADNVTTDPDETSLYLRTKPTDSETESSSDAGDVETEYLDQKLLSRCLPDLMDVDSPNHLLKTPVRTKHVTLVLDLDETLVHSTLDQCDSADFTLEVFFNMKNHTVYVKKRPYLKVFLEKVAQMFELVIFTASQRIYAEQLIDKLDPDGKYISRRIYRESCIFSDGCYTKDLTILGIDLAKVAIVDNTPQVFQLQVDNGIPIKSWFDDPADQELIELLPFLESLVDSDDVRPIISKAFHDKPE

SEQ ID NO: 70306 - protein, 178 aa, Zea Mays
MASAAGAALCPCSFSTVLSSSPSTPFRPARTTPRPSLRPLPRRARLPLRPGHSRVGSCLQVLRCLPKCDSGKPDGGGDAGLSGRKAARPAGQGGPRRPAQFGASSCGLAFTTVAGVIMLQASQQALAATQFAGLQPADVLGDLGDVSTGFASAFLLIFFSELGDRTFFIAFHVFDRHC

SEQ ID NO: 70307 - protein, 488 aa, Zea Mays
MALPSATVLWTASITFRLAQNMVVLFFLAALLAAPARSSSPSSNNGAGLQQPTLTLCSGHSTVAKSGEFASFLAAVCAGAYGGGVAHMSHSMSSYVAAENRTMYGVAQCRPDVSASDCTACLAAASSKLITGTACATSAVWHDACFLRYSDRDTGRFREDEHTETVFNASRALSSLPPHVGANKAVVVRRLLAAVADSTRSGHMCSDIGVGTGAAGGGRIYGLTRCAAEISCADCRRCLGGALAVVEREYNGSAGMQVLRLSCMARYESYPFYNTKFLTRRLLASATSGSPRPTHGGIVFNSSISFGPFGLVHSGGPNPPPSPPVSPPPPAFTTISVPASVGTAQPTPPPSRPAQAQPSPPPPAASMIVSGPATATPRAAQAQPTPAPPGGHNPPPASPPPASIMNISGPATATPTPRAAQPTPAPPGGPTPQPVAAATNDRLYCNWVGGCFHHPRTHRMVPSETATVSERTCHRTPCFESSSRWSAR

SEQ ID NO: 70308 - protein, 510 aa, Zea Mays
MKMCSRRLLGAVVCRTMINVDKIRPPRVQSADEVEKAKACQLEFGSYCLWSIEHKEVMIDTIVKRLKDQLFVARSYYPSIAKLKGKETLTRELKQNIQEHERVLSESIVDADLPSFIKTKVERMDQSIARAKSCTVDCNNVDRKLRQILHMTEDEAHFHMKQSAYLYNLGVHTMPKSHHCLNMRLTVEYFKSMPLDPNDSSAHTFNIPDNRHYVILSKNVLAASVVINSTVSSSEDTENIVFHVLTDAQNFYAMKHWFARNSYRESAVNVINYEQIIFENFPEFGTQQLYLPEEFRVFISSLERPTEKSRMEYLSVFSHSHFFLAEIFKDLKKVIVLDDDLVVQHDLSFLWNLDMGDKVHGAVRFCGLKLGQLRNLLGRTMYDQQSCAWMSGVNVIDLEKWRDHNVTENYLQLLRKFGNNGDEASLRSSALPISLLLFQHLLYPLDERLTLSGLGYDYGIKEKLVQSSASLHYNGNMKPWLELGIPDYRKYWKRFLTRDERFMDECNVSP

SEQ ID NO: 70309 - protein, 297 aa, Zea Mays
MRFLKAREWSVPKAYKMLMDCLNWRVQNEIDIVLAKPILPSDIYRVIRDTLLVGLTGYSKQGQPVYAFGVGLSTFDKASVNYYVQSHIQMNEYRDRVVLPAASKKFGRQINTCLKVMDMTGLKLSALSQIKMLTMITTVDDLNYPEKTETYYIVNAPYVFSACWKVVKPLLQERTKKKIQVLYGSGRDELLKVMDYESLPHFCKREGSGSSSDSLDGVDCYSYDHPFHQQLYNYMKQQQSLNQDSVGPRKQGSVHVDVPSPGLEEAKIAETIKAELQNLRGSGGLAHSFSSIQIEGP

SEQ ID NO: 70310 - protein, 61 aa, Zea Mays
MAAFLSPFPSSLLCSPWLPPVLPVPSPFSSRVLLSAGTHAPCSPALFLASMAVVSVEPQIE

SEQ ID NO: 70311 - protein, 1309 aa, Zea Mays
MGLLSVSRWAFEQGLVCSPNNWNCMEKLLEVLISIRDEVACLSVANLILNSWPSHHRALHVKKTIECAEPVPFAPRGIDILEPKHAKLIFSNKRKSVDDEICQEIGTKKSKHSATLQLNEAKWLALLDGILSLISANTEKAGEYNCSNTVDRCSISEGSAKGLAYNIIDVVISTDTLKSVETAGGNGNDSHHGEILPYDCKATVKEKDGNSDREHPHERRSTRLERLRSRKSGKDENGSDGKDISHAMTQFLESFILKGPSPVEKAYCSGNADASNPDTHNYTSNEEANDLKQFLCKISKNFGPHHIGYMLLEEMAHLKVPFQDYFVKLIELDKLTRGWAEDRSASCNLFLAELYYDRALCSGSPPTSSELSDSSYHLCKIIESVALELPFNISVREIHSTNLDTESSRTGESSSELIERSHENGHINMLNDQKSKHDSSSNMNCAFWIRFFWLSGCLSLSSDCKEKAYKEFNIALSILKNSNKTKSYGEVILLPHTKLVKSLTTDRILREINLIRLESLLWNNDENINKITHTEFMQLLPPLLLSTKDAYVGNAYGPQRESENVISLELSALDVLISACEKAKPMNIQVYLDSHRRKIQVLTVAAGMVGSVTPLKAKGSSNVEFVEAMNRNRLENVVEAVKDVSRNASKAKDIIDQCDNSVPSITIVLIHKYISQGYQVDKSSRVDKASIKRRLSVALALRRAHRARRLARLPPWRKASAAAQCVRCGDGQDGWSPLMSIVGDIQSLLLTIMCAAVKIILSRKLSCSGTSYQVDHLECSCLIDAAIAFCKLQHLDPTISIKTQVDLIVAVHDLLAEYGLCCAGRDGEGEEGMFLKFAIKHLMALDVKLKSQLNSNGMEEDAVPKDVRAEDSVADEPSVSDNKQNSDDEEESELDEIQSCLDSALDQAFFCLYGLKINPDSCSEDDLAVHKNTSRGDYQTKEQCADVFQYVLPYAKALSKTGLVKLRRVLRAIRKHFPQPPYDLFVNNPIDNFLDGPDSCEKILSEICESNESREAILNVLFPGERGYEAFKKLSTASSEPYSDVYENLYYFIAQAEDISATDKHTGFVLKKEGEEFVEQSANIFKYDLLYNPLRFESWQKLSNLYDEEVDLLLNDGSKHISILDWRTNTDLIRRVEMGRRHSRRCLLMSSLLAKTAPEQSEAHELLALVYYDSLQNVVPFYDQRATLPVKDSSWETFCKNSMKHFEKAFEIKEQWLHAFYLGKLCEKLGHSFSKALSYYNKAMMLNPTAVDPVYRIHASRLKLLYTQGKQNLEAIQESGCCRDLLPTTDLAWLFVNLACYISCLTAVG

SEQ ID NO: 70312 - protein, 844 aa, Zea Mays
MRKLFFSESACKETKLHCAPHSWLPLERGKLSKFSGHAAAGSSIEALMKMPEPAVLPYFKPANYVDILAQIHEELESCPPDEKSCLYLLQFQVFRGLGEAKLSRRSLQSAWEKASTIHEKLIFGAWLKYEKKGEEAISDLLSSCCKCSQEFRLLDFVSQVSTGSHMMNYDDDDDESDEFRGSAVVHFRIRDDMIACDRRKLAALSTPLYAMLNGGFRESYLEVIDMSRNGISPIGMRAISKFSLSGRLPYLSADAILEMLDFANKFCCKGLKDACERKLASFISSRQDAIDFMECALELGCSILAASCLQVLLNELPECLNDEQVVRIFSSANKAQRLTMVGNASFSLYCLLSEVSVSTNPTSDVTVSFLEKLVESASDSRQKQLALHQLACTRFLRKDYPESECLFNAAFSAGHLYSLVGLARLASLRGNKHFALKLLDSVMSSRWPLGWMYQERALYLDGDNKLENLNKATELDPTLTYPYMFRAASLMKRQSVEAALMEINRILGFKLVLECLELRFCCYLALEDYRAALCDVQAILTLAPDYRMIGGRVAAKQLRMLVLENVEQWTPADCWMQLYDRWSSVDDIGSLSVIYQMLESETAKGVLYFRQSLLLLRLNCPEAAMRSLQLAREHAASDHERLVYEGWILYDTGHCEEGLQKAEASIAIQRSFEAFFLKAYALADSSLDPSTTATVVSLLEDALRCPSDRLRKGQALNNLGSVYVDCGKLDLAAECYINALKIGHTRAHQGLARVHFLRNNRVGAYDEMTKLIEKARNNASAYEKRSEYCERELTKTDLQMVTKLDPLRVYPYRYRAAGMCFWLLISWSVLSCYYYYYTTRRSGL

SEQ ID NO: 70313 - protein, 165 aa, Zea Mays
MLIQFDGDVDASAPPTTCKNKKTPTLLPFSRRQNVRPPPRQEKACDHPPQVRAEALSIPVSIDRSGPLQPPPLSVAPRPSTVGDDDVNVEELEMTNMMSIPIGLDSTEKHKGIASQIEIENPNLVKTKNVKVKDIDTAYWLIALLKFMEPYPRGVAGAIYHEYDQ

SEQ ID NO: 70314 - protein, 447 aa, Zea Mays
MLLGTTLLVQPTKFFSLERLILARLSGFGSLGLRVYAKGGKTIVFTRTKKDADEVSLALTTSIASEALHGDISQHQRERTLNGFRQGKFTVLVATDVAARGLDIPNVDLIIHYELPNDPETFVHRSGRTGRAGKAGTAILMFTSSQKRTVMSLERDVGCKFEFISPPSIEEVLESSAEHVIATLRGVHPESTQYFLGAAEKLTEELGPHALASALAHLSGFSQPPSSRSLISYEQGWVTLQLTREPGYGRGFFSPRSVTGFLSDVCSAAADEVGKIYITADENVQGAVFDLPEEIAKDLLTMEVPPGNTLTKISKLPALQDDSPATDSYGRFSNDRGSRNRRSRGGGASRGRGGWDTDSEDRYRRGGRSLRSDNDSWSDDDWSGGGRKSNRSSSSFGGRSSSYGSRGSPSPSFGVRSSSLGGRERSFSGACFNCGESGHRASDCPNK

SEQ ID NO: 70315 - protein, 120 aa, Zea Mays
MGTRILPVNLSSRKTKTLSPLSPSAGHLLCRLFWVRSSCSRFSRCRPVAATKTPNEAANGHPWKLAFVLSVKFAPFYPCGHEVRTRGLIFPEQLRIRPCRTTDYRLRCTVSYQLGGVWIM

SEQ ID NO: 70316 - protein, 70 aa, Zea Mays
MYDAFGVRLQAGKQAKVLNQIVYELPSEHPLAETRPLRELLGHTPPQVFAGEVLGFAVATFIAMIAGLGS

SEQ ID NO: 70317 - protein, 1208 aa, Zea Mays
MMHLDGVDDELGDGDCAPSTARFELQEDPSFWKDNNVQVVIRIRPLSGSEISLQGQKRCVRQDSSKGQCLAWTGNPESRFTFDLVADEHVSQEDMFKVAGVPMVENCIAGYNSCMFAYGQAGSGKTHTMLGDIENVTPRNSVNCGMAPRVFDHLFARIQKEKELRIDETLRFTCKCSFLEIYNEQILDLLNPNSVNLQIREDSRKGVHVESLTEHEISNAREALQQLIEGAANRKVAATNMNHASSRSHSVFTCLIKSKWESKGINYHRFSRLNLVDLAGSERQKSSGAKGERLKEATNINKSLSTLGLVITNLIAVSNKKSQHVPYRDSKLTFLLQDSLGGNSKTTIIANISPSSCCAAETLSTLKFAQRAKYIRNNAIINEDASGDVLSMRLLQIQKLKRKDCDAALVAAFKREQEKEAAQLKAMIDANQIAEQLEAQKTEEVRSFKMRLKFCEERIKILEQVASGKLSVEAHLLQEKENLVKELEVLQCQLDRNPEITKFAMENLQLKEDLRRLQSFVDEDEREMMHEQIIVLQDRLLEALDWKLMHEKGPVTKALSLFEEPPSDEEKEFLRLQAIQNEREIELLRKKLTFCLEAKENLERHVNELTTELELTKKHDNTDKESKPAQLQDQGEADLHNLSDAQMEFKTLVDAIASASQREAEAHETVIGLAKDNEELRMQLKVLIEDNKRLIELYQHAFVNVEANQDGNPVNEDLLNAQPAATSDLHAHNSSNVEEEPKIVDEKCTNEDNFSRVTSVELCLQLEEMDEENEGLMGLHEKTMQERDVFKRKILEQSDSEAVKDILLGEKDAEMSEAAENPEVKHVHDSIIVALKDVLQIVRSKLELVQDKVVSTQDAVKYFKLLEMASGKATELYSRIELQYLGAQRLQEDITVLKSVLSESQEKIIAFEGKYFLPAASCWNMVLKTKSPAESRLDASFESMNQKKERFNHLQTRKNELSAARRRARESETELRSKIDGLKVKLGAYGAQRKEEEKVLFAIDNLDTSTAPMHKPKNYGKATAPLKSDEDWMKLRCELQKAREQFFMVQKEIKNINKCDYIDCEIAVLEAEIEDSWFSMLESDIERFVLDSTFTEIWEGRAKDMEASLVEYQDCVFQVSLKEEEIKMCNESLQYQARDRESDELQSKLNQAMRELGELLQDRRCLTDCSLDEPMLPVVEKVATDLEAVRIYVDEAKQLLLVDNQANQ

SEQ ID NO: 70318 - protein, 526 aa, Zea Mays
MRNNARLQQLGIPGLCDTLPKAYSFHHNKNKPNFTNNEDSESDYNPSSNDTGEEDLLDDDNVQGSKDYNMRTTNMSNGVIKLRTKRLLAEKESIRITRSKKTAAQPNGTEVFDNNDGHTQATVQASDPALFDEYTHMANGGHSIARPDGHNLMGNKDNVNIQVDDNMTSGGEASIEPSVHVQLGENDRWERGVNMGHGLHRMNRAMRGKLPVVIPEGRIRPVAPLVAAKFSTECNIAVRNHVPVYKHWKDYKNHNGMFNLFTDKLSAKFDINTNDAPVQKACSQMMKNAIRQQRYRLKKKFFDPFPLHLVTKTSPIRSMSNEEWNDLVEYWKSPKRMETSQKNKDNRSKVKFHQTTGSRSYMVHVENLGDKNIGQEPDALDLFKECHYSRKKKCYTSTVQQAITQMDNKRSATTEGEKSMSATEVVANVLAENTKKNLFLQNVGIQNVGPRSSLRNIEAQLEVEKRANSDLKSIVDAQHEQLDALLKQMQETEENRIREQEEVKKKQAEMETKMQLVLSQIHSRLR

SEQ ID NO: 70319 - protein, 72 aa, Zea Mays
MVSPEIQKDIANCFAEVIVNSIIEEIGGDVFCLLVDESTDVSDKEQMAVVLRYVSNCGELKERLIGVVHVAE

SEQ ID NO: 70320 - protein, 472 aa, Zea Mays
MRYYLVSRVKSGRHRPLCRRHLFQCDQWHQWDQRQYRSSLCSLILGAVVVTSTVVTLGAQKKMMRISARCLQMQCIQLSHHTTFSADRKASYLSQSACHSGENGTVPPVVRDTAHGARRYRNVAAAAARARRVAIAAGQGGWRRQAAGAGHPGVRRLHRGHGQQQRRPHAHQVQLQAIRQGPQRRRTHRTLLQRPDSDGLRSFTARLERSGSGVSRHRPQRRRPLHGRQLRVWGHRLRPAHLHSRVLPMQEELNMFAEYKERLAGVVGDEAAAAGIVAESLFLVCAGSDDIANNYYLAPVRPLQYDISAYVDFLVEQACDFIRQLYQQGARRIAVLGMPPVGCVPSQRTLAGGLARDCDPARNHAAQLYNSRLKEEVVLLQKELACQRIGYVDIYDVLQDMITNPCKYGFEVSTRGCCGTGDLEVSLLCNQLTAPTCPDDRKYVFWDSFHPTEKAYEIIVDYLFPRYIENLL

SEQ ID NO: 70321 - protein, 183 aa, Zea Mays
MEYTLLPDLAPHKIHAKIQVHVSRKWLFRGATDSGPLQHVDMVLSDREGNAIYAEIPGNLAEQKATNIEEGGVYDISRFRVCAAKTVFKIVDGDKMIQFTFHTIVKRATSPPTTFPLYVYRLTSFDLIEPHVQTTNNFVDVLGVITEIHELTPVHVRSQLTPTVTRTIIIEDLRCLPKWWSCL

SEQ ID NO: 70322 - protein, 296 aa, Zea Mays
MAILVGLVAVLSALFAAALRRLLISCRHPAYAAGFFHPYTNDGGGGERVLWCAVRAVQELCPDLPCAVYTGDADAAPEALAARALDRFGVRLLRPPQVVHLNKRKWIEASTYPHFTMIGQSLGSVYLAWEALTKFTPQFYFDTSGYAFAYPLARLFGCKVICYTHYPTISSDMVERVKHRSSMYNNNSLIAGSIWLSRCKILYYTIFSWLYGLVGSCAHLVMVNSSWTRSHITNIWKIPERTKRVYPPCDTSALQMLPLERPTTPPVLISVAQFRPEKIEKLYRRPNTKKPPYGGQ

SEQ ID NO: 70323 - protein, 180 aa, Zea Mays
MFLKERQLHDDFVTKISDMVWRRNGGNVDAVEATTDQGSAIEVAQPEDLKDELLLLTTGIGAACSLYCLLVFSLETDVSYALGVGFRIGITSEDLKNTIEKTLGGGGVALSSPRLVIPTVIFGLSALIDHFKNSFFSFEVLPRMMGFLAYKVAALVQVYRDNEDLRLILHEEEDADREST

SEQ ID NO: 70324 - protein, 757 aa, Zea Mays
MIVLIQTGCLKFLVILRSEELACASREQADSANGVGNSAHSGSRGSGALLPFSSTHNASTYGDEFDTTIITFNMAVILYHLHDYESALSVLDPLYRNIEPMDEPTALHVCFLLLDITLALQDATKAVDIVQYLERSFGVANTMNPNENASIAQQQLAQAKPPVKISMPPDSDSNAYAGGYENLSSGIFPDEQIEFESLCSSFDGHQNVGRRILNDFSRASADLAATAADLKVRLQIYKVRLLLLTRNLKVAKRELKVLMNMARGRDSSTELLLKSQLEYARGNYRKAVKLLSTPNNRTEPAMLAIFHNNMGCILHQQRSYHASIWCFSKALKYSLSFRSEKPMKLSTLSQDKSCLISYNCGIQHLMCGKPLLAASCFREAMPLFYKRPLFWLRFSECSLLALEKGLLCANGASSFNDEIEINVVGSGQWRQLIVNPVNSRSNLDSAGVTLGEHKNLVSLGFARQCLQNALLLLDATEKENWVIASDTEDWDQGTVHGYKSSGQKNTTSTDSKTPSGPTLANVNGEQKGTSLNATLQSSLAFYDEIRRKEYIKIRQAVLANLAFVELCLDNPLKTLTYAKSVLQVTDCSRMYAFLSHVYAAEALCTLNRTEDAAENLSVYIRDGNHVELPYSVENSEKALVEKDSDGEDLVAPAVTKLATEEPEQLRPEEARGVLYINLGMIAARQGEVEKANYMVSRGLAMLPNNPRAVLASVYVDLLQGKSQEAVVKLRRCRNVRFRPASIAASSQQSSLEKPPLS

SEQ ID NO: 70325 - protein, 266 aa, Zea Mays
MGGDYSDTVGVVDLGGGSVQMAYAISDDASANAPAVPEGQDPYVTKEHLKGKHYNLYVHSYLHYGLLAARAEILKANNGPFSPCILRGFSGTYTYNGEEYEAAAAPEGASYEKCRDGAVAALNLGARCEAKNCTFNGVWNGGGGAGQADLYVASYFYDRASQVGIIGGDAPNGRSTPAAFADAALKVCSLSVADAEAAFPDAWDAEYLCMDLVYEYTLLVDGFGLEPTKEFTLVTKVKYGEYYVDAAWPLGDAIETLSSQKLNQIA

SEQ ID NO: 70326 - protein, 62 aa, Zea Mays
MAPLHGGFSAGKSGLCCDSFVRRCGPSGFAPIQSHVFSSLLVVFPQAHERMTLRIIGPLGLS

SEQ ID NO: 70327 - protein, 721 aa, Zea Mays
MQDHCAQNFEEQMGKLKEKIYINNLRSLMIFGKYIMLHLLNILRDTFKEIRRLRVLSIFIYSHSSLPNNFSELLHLRYLKLLSPYYSEMSLPNTVSRFYHLKFLDLEQWGSDRSLPKDISRLENLCHFVVSEKIDSNVPEVGKMIFLQELKEFHVNKESVGFELQELGKLDELGGKLNIYGLENVRTKKEAKEAKLMSKRNLVELGLIWNMKQESTEDDILDSIQPHSNVRSLFIVNHGGTLGPSWLCSSDTIYMKNLETLHLESVSWANLPPIGQFYHLRELRLSKIVGISQIGPGFFDSTTEKSVSHLKAVEFNDMPELVEWVGGANWNLFSGIERIKCTNCPRLTGLLLCLPPLPHTSKVSRIHMGDFSYEGRTMLKINNPSRFAFENLGDLETLVAWDALPLSFMDLKKLHSLRRINVTRCEETFLRGLDDGVVLPTVQSLYLGRFTPTKNYLSKLFKCFPALSSLHVMASPSDEDNEEVVLHFPPSSSLRDVNFTGCKNLILPMEEGAGFCGLSSLESVTIHKCDRNITMDGFNPHITSSLKYLCVYNERNDGTDPYSVAADLLVAVVRTKTMPDVSFKLVGLYVDNISGVLVAPICKLLSATLETLNFSNDWRTENFTKEQDEALQLLTSLQFLEFYNCRALQSLPQGLHRLPSLHGITIYGPQNIRSLPKEGLPDSLRILRITNCCAEIYEACQQLKGTRPDINVLASKARVQN

SEQ ID NO: 70328 - protein, 926 aa, Zea Mays
MAHLGGRVQGADGGWFVPCADSGRSLPWARGGAGAGASETLAAVMARRAPAAAAIRRDALRAAEAAAGEVVLRVHPTREAERRRQDVIAYLRRLIGSCLGCEVFAFGSVPLRTYLPDGDVDITVLGNTWLNSTFIDDVRSMLQSEQENCDAEFKLTGLQFINAEVKLIKCVIENIIVDVSFNQIGGVSTFCFLELVDRQIGQNHLFKRSIMLIKAWCYHESRILGAHHGLISTYALETLVLYIFNMFHKSLHGPLEALYRFLEYFSKFDWDRYGISLNGQVDLSSLTVEPTDVQGESLLGKELQQGYLDRLVVIPNEFDGCGTQFRQKFLNIIDPLKANNNLGRSVSKANFYRIRSAFSFGAQKLGQILLLPSEYIRDEIYGFFANTLKRHGNGERPDVDTCSSFHPSRGPESALTEDGSKFKFCCMNEGENGSSCQCHSSKLPDKDSSVTDAHKNSGKYLPGLVQDISWNKIWFMEYASDFKEHTSTLASLSSHSPCSQDNSNGSSDECFENYAAEEDLHQNVPQQIYPEHPSHILTNSTSANILDFSSSCFGDESDWTAPRAGKKLLPPFLLSNMLDLSGDLELHLGCLRKVQYHLESLFDELLQAVEEACLADVLDEDSFKMSDIILKLKTSTRSSSLSLVSSTDSERRKLSHVYCSHSTGDDLQLSHAEVQVDMVWQQNVPLSPNGSTFTPSPSNNSDNYHVSWFCFSPTSHGTGTYIPNMSYHTYRERMMLERETIRARKQRQRFPDRRYYSAEQGFADSQTEDSVAQSGTNQSPTKQNSAQQSGYSSKSSISDGDFVRFKEHVATNGGTKQAVGRDFVEKGRHTTPPSSPPMTVLLQNGQGKPTCQPSSPVTADLFNAAKSLEFGSLGPFSLGLPSTSTQFEEEFPALPTRKRAEGPISVAPSAKAVETKSQKRVKRCSD

SEQ ID NO: 70329 - protein, 170 aa, Zea Mays
MPLLFPATPPLPLCRAARVSRRATASVASAARSSSSSSASFDAAAFEAERLRLDAAARAGMESTAAAAEAGPRAWKWAIRKRVWDALEAEGIARDPRPVHHRIPNFDGAPAAADALGRLDIFQKSHCVKVNPDTPQKQVRFLTLSGECEPFIEQERVSKCTTPLTQDSRS

SEQ ID NO: 70330 - protein, 471 aa, Zea Mays
MDESGEASVGSFRIGPSTLLGRGVAFRVLLFSSLWRLRARAYAAISRVRSAALPVAASWLHLRNSHGVLLMAVLLALFLRKLSAARSRAALARRRRQHEKAMLHAGTYEVWARAAKVLDKMSEQVHEADFYDEELIRNRLEELRRRREDGSLRDVVFCMRGDLVRNLGNMCNPELHKGRLEVPKLIKEYIEEVSTQLRMVCESDTDELLLEEKLAFVQETRHAFGRTALLLSGGASLGSFHVGVVKTLVEHKLLPRIIAGSSVGSIICSIVATRTWPEIESFFTDSLQTLQFFDRMGGIFAVMRRVTTYGALHDISQMQRLLRDLTSNLTFQEAYDMTGRVLGITVCSPRKNEPPRCLNYLTAPHVVIWSAVTASCAFPGLFEAQELMAKDRFGNIVPFHAPFATDPEQGPGASKRRWRDGSLEMDLPMMRLKELFNVNHFIVSQTNPHISPLLRMKELVRAYGGRFAGKA

SEQ ID NO: 70331 - protein, 83 aa, Zea Mays
MHVETGDEGSVGRRRFNLVVESSILLLAGSVSCGGGASAGTSGANLSTPPRAGCEGIEDPSPSNRPEPRPLLERERRGGGEEI

SEQ ID NO: 70332 - protein, 360 aa, Zea Mays
MRQSCSKWRTDEQGGLVRDVSFLHPIKIYLGAKFGTCQEVQKLRLYKNRRLVIQTSQSIGDAPYGDHFTVEGIWDVEQDSLDENCCDLRIYINVAFSKKTIFRGKIEQSTKDECREVFSLWIKLVCLFSYLKIFLSATFHLEGHDLLKQEYDRSKGASSTPDSGVQPGATTNEESAVEVAVPVASILETRFGLPAGSCSPICDHHSSTNKTPPGPNGSSWDLDGQFRVQQRKHRVGAEAPQLTKRGDAARGGTHGDDEARVCLAQVLPGETAEDAGQHMTAARVHGTGARVRYANSEVYTNTIQYNPEVVFSVSSVVTDGTDANRERWIVVCRGICRKAELQDPGIAFDVNSWSFPIALG

SEQ ID NO: 70333 - protein, 71 aa, Zea Mays
MVGGWGIYSPNHQTSRLVELTVVWCTGHVRCASHVTKADGIRPLEHCLLGPPGCPVAHRTCTVECPVRQHG

SEQ ID NO: 70334 - protein, 121 aa, Zea Mays
MRLLQAEELFRKVLEVGSKNKAARLLGLDVGSKYVGVAISDEKNRVAMPLRFGKLCESVTPDLHPFSLCSIRLGQAVKSEKIRISSFPCPLCTCLEFCNNCLCCCHKCFVSDKNKHQLDGR

SEQ ID NO: 70335 - protein, 163 aa, Zea Mays
MRLLIYGLRLYTDEALVKSVTREGKPEELLRGPLYYVLVLLFSVLVFWRESPIGIVSLSMMSGGDGFADIVGRRYGSAKLPFNRKKSWAGSISMFISGFLLSAMMMLYFSSLGYIDVIWEEALGKLALVALAATVVECVPVTEVVDDNISVPLATMLYLMATA

SEQ ID NO: 70336 - protein, 114 aa, Zea Mays
MLLHFASKQIHSLTNGTQLHLCRNGPRCTNKSRARSWLRAASPAAATTSASTNRRRQRPPLHQQRQRPLLRAVRQQQRPPQGERRCERSSSRLPKGATTRPLKPKSQGLSGRWP

SEQ ID NO: 70337 - protein, 307 aa, Zea Mays
MNTVHFALQAGLSKLIIWFQPKGPEAAVDMGWKDYFMRVVPTALGTALDINLSNASLVFISVTFATMCKSASPIFLLLFAFAFRLENPSIKLLGIIVVISTGVLLTVSKETEFDFWGFIFVTLAAVMSGFRWSMTQILLQKDNYGLKNPITLMSHVTPVMAIATMILSLLLDPWSEFQKNSYFDSPWHVMRSCLLMLIGGSLAFFMVLTEYILISATSAITVTIAGVVKEAVTILVAVFYFHDEFTWLKGFGLFTIMVGVSLFNWYKYERFKRGQINEDDVSSPFTGDVKYIIIDDLEYQNEFEEDT

SEQ ID NO: 70338 - protein, 463 aa, Zea Mays
MASTAATVTFGGKGAALSPAAVYALSIGLAAPGIDPSAHKALSTRAPSPQETPAPLAAALPALAPAESRAAAAVLLNKLVLTASDSASALVTAATAVGLAGSLDLAAALPLGSRDEVAVAAASAPVAVGLAALVDCCAAPLARVADAVAALSCEAVRGDAAAFDVQASGDGLSSKDEADVAADIKVLVFGSKLVGAAGGAPAAATFAKVPALNGIFRQAVRALHAQVRIELNAPVKLGKKDAGQTDAVSVLKGVYNHLLKFRDFLSWEAAMAMAVIETDSSIEKPQSAVDNEAAGSSEKAQAGGDKAKGDKKSKKKKTLGKGTSAVLMLLRDHVTNGSTVASVNSVLVAEWAASLSLLFDPKCPGLVSLVEKVKEIVESNEVRRLPKIPKGTRDFGKEQMAIRERAFSIITSVFKMHGATALDTPVFELRETLMGKYGEDSKLIYDLADQHKRTEEIPDCKSI

SEQ ID NO: 70339 - protein, 208 aa, Zea Mays
MNEYRLPSGEADRYQKEISLCKVYKRPGIEDNFHLSTTTARSSGSKAAATMEKKHHRTSASPRMAPVFDGGHSSGYMNKPYSGANTTMLGMASSAAARAATLAPQTSMFLSTPSLSSTTSTEEDGTSLYHMKGVNPPMLPSSTHALLNANSATMATIPIDELSRAIGCQGDPNQTLPTQAPLLPFPNLEKIWDWNPLLESPKVCTSFK

SEQ ID NO: 70340 - protein, 151 aa, Zea Mays
MGVGYPLDIVVCSALGADMYDCVYPTRTARFGTALVPEGVLKLKHNSMATDERPIDHTCSCMVCKKYTRAYLHCLVTKDAMGSQLLSYHNLSFMMRLSRDLHMSILEGRFPEFVRGFLRVQFPTGDVPQWVRNAMEVAGIDISECCASTNV

SEQ ID NO: 70341 - protein, 256 aa, Zea Mays
MVSVSVLVAIFKRSTVPTFKSYGIVQARISDCASETFSAIRTVRSFGGEKRQISLFDNLAHAYQNNGTKLGVLKSANESLTRVVVYVSLMALYILGGRKVNAGKLSVGTMVSFIGYTFTLTFAVQGAVNTLGDLRGTLASVERINSILSAKDIDDSLAYGLAKELDGKEFDDSNGVYENGSVNKHFMSELKSSSSCSNLAWSGDIRLKGHIIITSGLVTFVFTSRVPLYLSLYYISPFVCFIYYYYIAYCSLAYGS

SEQ ID NO: 70342 - protein, 199 aa, Zea Mays
MNMSQHVMKQVNFCLFSFMIRCLCTYSIQEKYEGAMASLAQMENRAVMAETMLEATIQYQSSQQKAQLPSPSPSPRTPTRDASPGQGNQDSSQEFQPRRISLLAPFSSLGWRDKNKNGSDESTNGKLNNSTDQGVETPKKDDEKKADSPKESEQIVRTPERDNELRLGTPKMDSEVPSVEMAANSTNGLEDQLEEIKLD

SEQ ID NO: 70343 - protein, 145 aa, Zea Mays
MAVLALRLGFVAPPHPRTSSGRFAFSPPSSRAVANAGVAAGPSRPITVDGDPPTVVSAPGRRIVAIGDAHGDLSQTRAALVLAGVLSTESEGHVWTGGRTILVQVGDILDRGEDEIAILSLLSSLNMQAKSQGGAVFQLNMGLSV

SEQ ID NO: 70344 - protein, 1006 aa, Zea Mays
MALFNDQAGAASDPKLVLPITGGSCSEPANKKQKKEAQRRVQHVGVQGPFIKSRWSHIPITFSQEDLQLKDFPHNDAMVISCVIKGFLVHNVLVDTCSAANIIFAKAFRQMQEPEDKIHDATHPLCGFGGRQIVALGKITMSVTFGFINNTRTEQVVFDIVDMEYPYNAIIGRGTLNAFEAILHPAYLCMKIPSDQGPIAIHGSQEAARRAEGNWTDSKPIHNIDGAEACEQYKFRREKAASADQPKPMLLCEDIAEQKVLLGSQLSEEQEKTLIRFLFNNKDVFAWSANDLCGVNRDVIEHSLNVDPSFRPRKQRLRKMSDDKAEGACNEVKRLLSAGVITEVKYPEWLANTVMVKKANGKWRMCIDFTDLNKACPKDEFPLPRIDSLVDAAASSELMSLLDCYSGYHQIWMKKEDESKTSFITPSGTYCYLRMPEGLKNAGGSFSRMTAKVLQSQIGRNVLTYVDDIIVKSTKQKNHIVDLQETFASFRQAGLKLNPEKCVFGVKKGKFLGCLVSTKGIEANPSKIEAILQMEPPTTKKGAQRLTGRLASLNRFISRSAERNLSFFEVLKSAEVFQWGPSQQKTFEELKQYLIDLTTLTPPTPGAPLLLYVAASHSAVSAALVQEKLDGQVKKQVPVYFVSEVLSISKKNYTELEKVLYAVLMASRKLRHYFQAYNIVVPSSQPLKDIMRNREATGRIGKWAAELNEFCIDYVHRSSIQSQALADFIADWTPGAQDEETNKDAEVWTVFCDGSWGTFGAGAAAVLVSPSKVKTCYAARLDFSCTNNITEYEALLLGLRKLKAMGIRRAILKTDSQVVSGHIDKSCKAKDPKLEKYLDMVRRVEASFEGFSVKNIPRGQNEHADLLAKSAAQGLPLPLDVFFETIKAPSVELLERAVLNISPVYSEDWRTEIISYLQGKFLSDDETYNRRIEARARPYVMIEGELYKHGICAPLLKCLSRTERHRVDERNYMQACVDLTLDLGHYLEQFSVKGFIGRRQLRMQRN

SEQ ID NO: 70345 - protein, 151 aa, Zea Mays
MTPSSTGKNSELPDEPANVPPSQFGSQKQAHVPITQAFEDDQGMNCVAISAVEWADTLTNISFGHLLTEASKGTHLDCGGTSPPGSKKVQTLLAALLILTMEFIPQILKDLKVFLRTWLERLMLIIIIIMMMPKTRSFMPNHHLEMMKLMS

SEQ ID NO: 70346 - protein, 157 aa, Zea Mays
MVPWMPAPLLDAPARFLACSPRPMPSSHGRPGSPWLSFLPAGSPQIAPGLFPLVENTSALNPPLLMVDVSSSMVPRSPSPCPCSLFSSRQPWCVVRLGETSGVGGRRARSSKGNARRVLGGTSQPEVVVDLSDSRRFSCGTLIDHVMWKTIVGLISK

SEQ ID NO: 70347 - protein, 531 aa, Zea Mays
MGRHRSAIKELSVALTYESSSIECLYLRASSHHAIGEYKAAIKGYDDVLDLELDSMDKFVLQCLSFYQKEMALYIASKANLEFSQFNIDDDVDPLFKEYWCKRLHPKNVAEKVYRQPPLRISLRSGRLNKQDFKFTKHQTTLLLAADSIGKKIQYNCHGFLPNQRQYRMAGLAAIEIAQKVSKAWRFLRNPKNIAKLVRKRDKLNMSQNRGGYCSTSTLAGSPTSSPNEDRVSSGISLSWQDVYNIAVKWRQISEPCDPVVWVNKLSEEFNSGFGSHTPMLLGQAKVIRYYPYYQRVLETAKTIMLDLKYVNNAEDRAIFLTDIDKLKKIEIASSCSDLYHVVGETYWVATRCDSMAFRGRRLEGTRITTQNIGKTGFDFAIRTPCTPSRWEEYDEEMTAAWEAICEAYCNDTNPTRDPGVLDAVKDAILRMTYYWYNFMPLSRGSAVVGYVVLLGLFLAANMDITASIPPGVQVDWEAILSPDPGTFVDAVKPWLYPSTKISRCLKDYTDVSCAFSTTGSVVAALTSVDP

SEQ ID NO: 70348 - protein, 143 aa, Zea Mays
MLAATMYYHNKTKMPPPPCSCFSAVSVPFSSFKTITMLLLLLLILQQLSAAAVAGMATGELHPLRLVSVVGVYRNSLYDLGSSIVAIQERRYADAKTSMSAAVDAPVTCEDEFKEQGLEPPMRAETKRLFQQAVISLAIISLL

SEQ ID NO: 70349 - protein, 82 aa, Zea Mays
MSTRTRRRRIPVSNSTWTRPLSRWPTLCVATLRDAEALALPLLAHTTVQRGGRRQRRDEVPQRRWASKFPLSRFLPPLWRIR

SEQ ID NO: 70350 - protein, 136 aa, Zea Mays
MLSESPLLLWLICATTASLLSYGARISTPLPPCPLLQLAVAASLSPWPRLCGCVLSSECSICRGPALSARFGVGFSCRSNAPLFPLSCRRRSVTSPRLVFTLTKESQEDVKKQALVDTSSARRKARTRIIIVYAEF

SEQ ID NO: 70351 - protein, 119 aa, Zea Mays
MGELEAERWAGSRRGWGRQNAAIHRGIRVLLKLSTWERELGTAREGIELVRPGKRETAVPWEGLRQVAQGSRGSDGQAPWVGRVELGCLQGRWRGRRDARDTTSQPWRAGAVAGTERRR

SEQ ID NO: 70352 - protein, 2946 aa, Zea Mays
MAFVDKSVGKSSIRSASLASKLFALSQGWGGKEGGLGLVACSLPSVSDPVSTEVGSTLHFEFYRAADKSEKSQCLEKENKLEVIHLSNVNSCKEADLEILDRLVKDYSVPQALRFLLLTRLRFARAFDSLTCRHQYICIRLYAFIVLVQAGHDLEVVSTFLNNEPEFIDELLSLLSYEDEIPEKIRILGVLSLVALCQDRPHQPTVLSSVTSGGHRGILPILMQNTVDSIINGSMKWSIIFAEALLSLVSMLVSSTPGSLALQEAGFIPTILPLLKDTNTQHLHLVSKAVHVIESFLDYHNPSSAVFRDLGGLDDTIARLKLEVSQVEVDSKLIDHSTNEGNEVESYPPVQDIQPSCSESLILYHRKNLIKVLLRTISLATYVPGSSARVDGSEENVLPPCLCAIFKRGKDFGGGVFSLAANVMSDLIHKDPTCYTVLDSAGLPQAFLDAIMCGGLYNSDAVSCIPQCLDALCLNNNGLQLVKDRNALRCFVKIFTSRSYMKALSGDTAGALSSGLDELMRHAPSLRSSGVSMFIEILNTIFKVWCGVDSIPYKESDNYSAVIPMDTDVVVATSQSEGVPPEVGCSGETVDAPLDAVTSSSIELFLPECICNVARLLETVLQNADICRLFIEKKGIEAVLQLFKLPSIPVSVSIGQSISVAFKNFSPQHSVSLARAVCSFFRDHLKITNELLGSISGTMLVGSEPAKQSALLKPLSTLEGLLSIANFLLKGTTIMVSELAFADAEILKELGKVYIEVTWQISLLSDSKVDTQDADQDDLAEEASISERDSDDDTNTAPLSRYMNPVSARASISPWSMEQDFVSTVRSVSHMHHHGRHSLSRISGRLNGVLNATSTDLDGPCFPAETSRRHDALKRIPDDVVSELLKKFCCTMRSFLSTLVKGLPAHRRPDSNLNPNSRSLVTALAQFFLSALGFSGHSTAGFEMSLSVKCRYLGKVVEDMAVLTFDSRRRLCNSALVNSFYVNGTFKDVLTTFEATSQLLWTLPFSVLAAATDQGSSINEKVSHNSWLLDTLQSYCKFLEYYVNSTFLLSPSSSHNRLLVQPIVTELSINLFPVPSDPESFARMLQSQVLDAVLPVWNHTMFPVCNPAFVTSLVSIMNNICSVVGDMKQSRSSVGVANQRVTGPPLDESAIATIVEMGFSRARAEESLRSVRTNSVEMATDWLFNHPEDSVQEDVQLAQALALSLGSSIETPKEDGSNKNDTVIAEEKGVFVLPLDDILTVSTKLFQSSDSTLAFPLTDLLATLCNRNKSEYCKRVVLYLFEQLRHFSSDATDMGALYSVAHVLALLLSEDSGIRETSAENGVISQVLNILGSLKSRTDQTDHTWNSISALLLILYNMLQFNPKLSMETMDGISKSISDASSADSEENPLPTAEHRTEIIDSADDASANVFKKILGKSTGYLNDQESQKALVFCCEFIKLCVPATVMHAVLQLSARLTKTHALAALFFESGGLASLLNLPGTCIFPGFETLASAIVRHLIEDPQTLQSAMELEIRQSLSNHGSRTPSSFLTNMAPLISRDPVIFMKAATSVCQLDYSGGRLNVVLLKDKEKDREKQNVPVTESGVPCNEPVRVTAEVKTVDTPNRCSRNHKKVPASLPQVIDQLLEIIMSYPSASKEHGFDGYSLLTPMDVDEPNTKGKSKVGDGQELDGDAFSERSALLSKFAFVLKLMSEILLMYVHAVGIILRRDTEISVSRSCAQGAGHSGLLHHIFYLLLPLPSVKIADTSDDWIGNLSERASWFLVALCCRSAEGRRRVVSEIVKALNQFIGSASNTSRGSLIPDRKVLAFSELVNSILSRNSQSNLPVLGCSPDIAKPMVDGGMVQSLSVLLKVIDLDHPDAVRVVNLILKALDSLTRTAYTTDQVLNSDRFTKNRLPGSHEQTHEADDIVIPEQTTYDSHHHTNDIESASQQAQELSHVGGNNNENLDQPAEQEMGVDLADNSTSNGNPPTRAVQFMREEPIEGNVMAPSTDIGLAFSMQHQVDGMGVEDEDLGEESEDEEDEEIAAEGAGLMSIADTDIEDQENNAIGDDYNDDLMDEEDDDFLENHVIEVRWRESLTRMDYDHHLRFSRGRADSSGFIDISSESFHGVGTVDSFNLHRSFGLERRRQIGSRSLLDRPRTDVNAFLHPLLVRPAQSREGTNSAWPSGGTSSRDFHMLSFDIPSYMLDAGFSPETAPPVFGERVVSTAPPPLIDFSLGMDSLRIRRGPGDNLWTDDGQPQAGNHAAAIAQAVEDHFVSQLTVANNSNSAPQVRPEQTGNGANAHSELPDTGNAEPVTTDPLSQPVGRHQLVCTVNQGPVPANDVLCPTDVHVNQHLVDSIYDSRVVEPVQQTAAGDPNTIPQSDEMMCIAGTQLGGHPERDSLSGNGSYGNIMQNEIEAPQQVHLGNDPREPPSDLESSCHALVTSASAAPELSDAHVDSSAVNADVDMNIVDIAENEVGNSAPASDGNDLSSRRYEDALQEPQTVQTNAINEASSANEIDPTFLEALPEDLRAEVLASQQNRSAPAASYTPPAAEEIDPEFLAALPPDIQAEVLAQQRAQRIAHSQPAGQPVDMDNASIIATFPPDLREEVLLTSSEAVLSALPSALLAEAQMLRDRELSRYRARGSLFGGSYRLGGRRLPTDNQTVIDRAVGVTVGRRVISTTCSSKGKDVEGTPLLDSEALRALIRLLQLAPPLSRGLLQRLMSNLCAHSVTRVTLVGHLLNMIKPEYEGLSVSDCMATYRLHGCHWNIVYAQSCSANGVPPLVTRRLLEILTYLASASPSVVDLLIYFNPSASPNCLTLQHNKETSQESSMQNMMPPYSKAYTPIILLLKLLNKPLFLRSRVYLEKVLYLLEVVINNAASQVDCPPHSVQITNNSDIEFVDGTPYQTQVEPSTLEQGHIPDNNQSRDVEVPPSCAKLDVNVHAILTQLPDAELHNLCNILALEG

SEQ ID NO: 70353 - protein, 95 aa, Zea Mays
MLCTVDLRSQDLMKRRARWGIPSEFCAAGNGERDRERRARSLSSLRGGRSSVAGTGRARGRDRACAGGRNRARRRARRPRPVWWRWLADDERGVG

SEQ ID NO: 70354 - protein, 465 aa, Zea Mays
MDWDLKMPVSWDLPDLEHDAVPPPIAAAASAAPSPAAASGIAAAAAGPPPAAAPRGAPSRAECSVDLKLGGLGEFGAADGTKEPVVAAAAAAAAAPPSASPMKRPRSGPGGAAGAQCPSCAVDGCKADLSKCRDYHRRHKVCEAHSKTPVVAVAGREMRFCQQCSRFHLLAEFDEAKRSCRKRLDGHNRRRRKPQPDTMSSGSFMTSQQGTRFSSFPVPRPEPSWPGVIKSEDSGSYYAHQRHPVLSSRPHFAGGGSTPPAYSSKEGRRFPFLQDGCDQQQVGGFSAGAGAQQLEVSSTSTVCQPLLKAAAAAAPPPPPESSSSNKMFSDGLAPAVLDSDCALSLLSSPANSSSVDVGRMVVHQPAEHIPMAQPLVPGGLQQQQQHHPFGGSPAWFACSQAGSSAVSAGGFACPPGVESEQLNTVLVPSSDGGGHDMNMNYHGIFHVGGDGSSDGTSPSLPFSWQ

SEQ ID NO: 70355 - protein, 285 aa, Zea Mays
MGNARRPAADSAAASDREVGFAKLHGECFEYYMQTYSIVLGRHSRRRSKGPVAAPPEADDGVDVDLGALGAGMNVSRRHARIFYDFLRRRFALEVLGKNGCLVEGVHHVPGSAPVKLDSQDLLQMGDTKFYFLLPSRSVFDAGITRRSSAVQRAIPPPPSDDDEDEDEHEEAVAAAKRRRDGYNGSKSYREADDQLLLQLEEKDVISSAATILSDLCGPQEWISINKLHEVMFDKYGGMWHHSRVRKYLTSEDFAEAETDGRLWHGLALLLRKYPEHFVINIRKE

SEQ ID NO: 70356 - protein, 186 aa, Zea Mays
MKILVAVKRVVDYAVKVRVRPDGRGVETANVKMSMNPFCEIAVEEALRLREAGVAAEVVAATVGPAQSADTLRTALAMGADRAVHVLHDPDPARPLLPLAVAKILRAVALQEKPGLVILGKQVLVSCLLQLLFIFLQAPVEPYMSKVDPGQDRKTRIKKKNRKTATPFVVAQDRQLMMIATKLDKC

SEQ ID NO: 70357 - protein, 699 aa, Zea Mays
MARDLAPEVERLLQNRDPNTKKKAALCSVRIVRKVPDLAEIFMSAATSLLKEKHHGVLISAVQLCMELCNASNEALEYLRKNCLEGLVRILRDVSNSSYAPEYDIGGITDPFLHIRVLKLMRILGQGDADCSEYINDILAQVSTKTESNKNAGNAILYECVETIMSIEATSGLRVLAINILGRFLSNRDNNIRYVALNMLMKAIAVDTQAVQRHRATILECVKELVDYLEVSDQDFKEDLTAKICSIVEKFSLDRLWYLDQMFRVLSLAGNHVKDDVWHALIVLVSNASELQGYSVRSLYKALQASSEQESLVRVAVWCIGEYGEMLVNNLSMLDMEEPITVTEYDAVDAVEAALQRYSADVTTRAMCLVSLLKLSSRFPPTSERIKEIVAQNKGNTVLELQQRSIEFSSIIQRHQSMKSSLLERMPVLDEANYLVKRAASIQAAVPSVNSAPAVTSGGPFKLPNGVGKPAAPLADLLDLSSDDAPVTTSAPTTAPNDFLQDLLGIGLTDSSPIGGAPSTSTDILMDLLSIGSSSVQNGPPTANFSLPGIETKSVAVTPQVVDLLDGLSSGTSLPDENATYPTITAFQSATLRITFSFKKQPGKPQETTISASFTNLATTTFTDFVFQAAVPKFIQLRLDPASSSTLPASGNGSVTQSLSVTNNQHGQKPLAMRIRMSYKVNGEDRLEQGQISNFPAGL

SEQ ID NO: 70358 - protein, 272 aa, Zea Mays
MELGKPLSAHRCSYTATYTHCSIGFSPRVVRTSWIRAAAEGGDGGADRRRRGASFAADGPRVVEVAAAPVATSGGAAGAAGSAGFGARDAELAMWDKLGAVVRLSYGIGIYGAMALAGRFICQMAGIDCTGGFHPSLTALVEGLGYAAPPIMALLFILDDEVVKYSPHARAIRDVEDEELRSFFCGMSPWQFILIVAASSIGEELFYRAAIQGALADIFLRSTELMKDARGIASLSGIVPPLVPFAQTFAAVITAALTGTLYYVATTPKGSS

SEQ ID NO: 70359 - protein, 66 aa, Zea Mays
MLLMVFERNIKVLLRQMSFAQGIWLGVSCLVIPVQANLVTCYLKSPCLVYLLVGTIAKLHVPCLVV

SEQ ID NO: 70360 - protein, 803 aa, Zea Mays
MAEEAEGMDRFDMEGDFEGGRFGRDGEFYYRSRRERAPQTRDDAIYGVFAEGDSDYDSEDDEGTRRRRRKRRKDGGGEADLTKPVQFVSTGKFMPTQEPEPEERPGLGRAAAAAADKEEEEEEEDQDDEGDTEMLPAMFGKIRDGARARREEKEREREMAARRRQAAGLGAGEPSAAPGSLESNSKVAKMMRMMGYKKGMGLGKNQQGITAPVESTLRPKNAGLGSVEGFREPKIMSAKENVPAPPPPPASAKKKRWSKKATTKKAPILTKNELLAMRAEQEQEEQPAVVQKVIDMRGPQARVLTDLKGLNEEQEMEANDVPMPELQYNVRMLVDEARADIVRLDAQLRREQEKVASLVREKEKVAKQEASQKRQLLVMERIAETLEKVQDDDASGMLTLDGLIQTFHGLKVQFEEEFKMCSIAWIACRYAHPLLIRVFQGWQPLHDPKFGLEVMKKWKDLLQGDQPYDFSDSAASMTPYVQLVSEVILPAVRISGTNSWEAREPEPMLHFLELWDNKKLLPPVLLQSLLEHVIMPKLSAAVDSWDPRRESIPIHVWVHPWLPMLRERIETLCHSIRYKLSTVLHVWQAHDASAYAVLSPWKDVFDSASWEDLIVRYIIPKLRLALQDFQINPANQKLDQFNWVMLWTSAIPVQLMVHMLEVDFFSKWQQVLYHWLCSPNPDFNEIMNWYKGWKGLFPPELLANERIRMLLTAGLDMMNQAAEGLEVVQPGARENVGYLRATEKRQFDAAQQAYHAVPGAAMADLSFKESIQAYAMEQGSSAHQQGLRQCLDLHSNRCNLQER

SEQ ID NO: 70361 - protein, 99 aa, Zea Mays
MTPEEILGKFVSGRMMIKEARYVDDALNGPIHEPQPIALKATRSKEALPSKVAQVEAAGLNDEEMALIIKRFKTALKERKGQPYKNKTKGKRSCFKCGK

SEQ ID NO: 70362 - protein, 868 aa, Zea Mays
MKTYSAEEGLTEEAIVTKLRICRYHHLYLHNSLKNNSSGTSRWGEFGEGGLLWGECSGKSFEWFDGSPIQELLCKVREIYGLDEKTVFRDVTVSLEGRPQPLHLGTATQIGVIPTEGIPSLLRMVLPSNCGGLPSMYIRDLLLNPPSFEVAAAIQEACRLMGNITCSIPEFTCISAAKLVKLLESKEVNHIEFCRIKNVLDEIMLMNRDAELSAILHELLVPASVATGFKVEADMLMNGCSIISQRIAEVISLGVESDQAITSLEYIPKEFFNDMESSWKGRVKRIHAEEEFANVDRAAEALSIAVIEDFMPIISRVKSVVSSNGGLKGEIGYAKEHEAVWFKGKRFIPNVWANTPGEQQIKQLKPAIDSKGRKVGEEWFTTSKVENALARYHEADNARNKVLELLRGLSSELQDKINILVFCSTLLIIAKALFGHVSEARRRGWMLPTISPLSKDCVVEESSSAMDLVGLFPYWLDVNQGNAILNDVHMHSLFVLTGPNGGGKSSMLRSVCAAVLLGICGLMVPSTSAVIPHFDSIMLHMKAYDSPADGKSSFQIEMSEIRALVSRATARSLVLIDEICRGTETAKGTCIAGSIIERLDNVGCLGIISTHLHGIFDLPLSLSNTDFKAMGTEVVDGCIHPTWKLIDGICRESLAFQTARREGMPDLIITRAEELYLSMSTNNKQGASVAHNEPPNGSPSVNGLVEEPESLKNRLEMLPGTFEPLRKEVESAVTTMCKKILSDLYNKSSIPELVEVVCVAVGAREQPPPSTVGRSSIYVIIRSDNRLYVGQTDDLLGRLNAHRSKEGMRDATVLYVLVPGKSVACQLETLLINQLPSRGFKLINKADGKHRNFGISRISGEAVATGRN

SEQ ID NO: 70363 - protein, 106 aa, Zea Mays
MEAGLRALGHRYFGGGGGGLGGFAAARATRLRRQRQRRMAAFCSLAVNGDGNGAAGGPVGSGVEVARARRMLHVVLVSPLIPGNTGSIARTCAASAVGLHLVGVSH

SEQ ID NO: 70364 - protein, 137 aa, Zea Mays
MTCRADGRAIHELDRTERAGSTANRETGYAQGQRTARIRRAARRRRAGMGSLDRALYGGVRLGLGREETSAGGLARGEADSRGSSRPWRNRGATARSWGQAAAMGKQSSRRPWGTGPAELGPARRRSAGETEKSERG

SEQ ID NO: 70365 - protein, 197 aa, Zea Mays
MLLLCSLLVVCRLLALVLRCPTPASSPQSAPADPTTAQALTQHLSVSRGKEHLRVTSAIARSTSPPAAAARPRRMLGHRFPTALRLPHGLLQRRSIMARRGLTIMAGGEAEGPLAGFFDYMERLRNYERSGVPRGAGTDSDDGFDLGRMRRLLRRLGDPHTHFPAVHIAGTKGKGSTAAFLSNIMRAQGYNVGCYSR

SEQ ID NO: 70366 - protein, 51 aa, Zea Mays
MQHISDKSFKTTRRWQMHRSLPGINTTLVLLIDDHLVSIFHSGAGLMHPQD

SEQ ID NO: 70367 - protein, 159 aa, Zea Mays
MHGEPEGGGGGGGRGRRAVGAAVGRRQLHPRQRLHHAAPRLPAGAVAQEAPPPPPRRLPARARLQGPLQRHRRGQGGDRGDGGGARGDGGGDGEPARRLHARRRPPRQELPLQHTTAKDPVPDVHAPPWRDMEKIEAEKVILKLRGRRRNSRTGTARQA

SEQ ID NO: 70368 - protein, 145 aa, Zea Mays
MHSRRDRQARQQPRLPRRRSIHHTGVIPFRRGKYRRRGVSSVERRPGLARHLQSLLLRVLAMEIYATPHANSCWTPRRRRVAPVCSSHGQARDGVIADRFASLDLAIPCFPQHSCCRVSWIRTHAPAQAATRHPLPFEIHRKVSD

SEQ ID NO: 70369 - protein, 60 aa, Zea Mays
MGAPDCPVRQPRHPTVRVLTVLTIGALIAWGTGQSGAAPDSPVSHRTCTVHCPVRLLALL

SEQ ID NO: 70370 - protein, 151 aa, Zea Mays
MALAAPSSLRLLPTTPSQAPSPPCASRPRHLRELRLCQRLATAAAAAAAAAAAATAPLASSPTTSADTERRKHELLRAVQETRRGFAAGPDQRAAIEEAVVAVEERGAGKGTPIDLAALDGTWRLCYTSASDVLVLFEAAERLPLLQPNQL

SEQ ID NO: 70371 - protein, 353 aa, Zea Mays
MASKVVDLRSDTVTKPSEAMRAAMAAADVDDDVLGADPTAHRFEAEMAAVMGKEAALFVPSGTMGNLISVLVHCDVRGSEAILGDNSHIHVYENGGISTIGGVHPRTVKNNPDGTMDIDKIVAAIRHPDLHYPTTRLICLENTHGNTGGKCLSVEYTDKVGEIAKSHGLKLHIDGARIFNASVVCLSKGLGAPVGSVIVGSKAFIDKARILRKTLGGGMRQVGVLCAAAHVAVRDTVGKLADDHRKAKALAEGLKKIEQITVDSASVETNMVFFEVMDPRISPDKLCQVLEQDNVLALPANSKSIRFVIHYQISDADVGYALACVEKAIKELLEGSTELGHSINGATKSSYGH

SEQ ID NO: 70372 - protein, 224 aa, Zea Mays
MAAARMALVSCARRLPSLPSPLTLSRPRAGAVSFLAAQPSPATAPRSGRNLALFCSLSPTSPSLTEAAVALPPPKAAVEETKPPVPSGDEKGEPTVEELAGLLDVRVGRVVKAWRHPEADTLYVEEVDVGEAEPRTICSGLVNFLPIEELQDRNVIVLANLKPRNMRGIKSNGMLMAASDASHENVELLIPSEGSFPGERVWFGSEEEKNRQSDPASPNQDRKI

SEQ ID NO: 70373 - protein, 178 aa, Zea Mays
MAVSCGWSWLRCKKKTEALHEPSTSGPGASSLVANACSGTQVDGRRQASAGGRRLRASRAPPRVAVVPSNLQRVHAGGRPGRAAPPLGRRIHGPRAWRLCACGAPRPVQRRRGSGSTPRARASKGIARSRRSPQLLPCYATPAGRIAATPLGGDAKSDLLPAIPTAGRGEVKKKGKIK

SEQ ID NO: 70374 - protein, 852 aa, Zea Mays
MAQLVPQSCKEGIGKGKFLKYGAGGGAGHGGRGGTGIYNGMRSEGGLEYGNADLPCELGSGSGGSALSADNTAGGGLIVIGSMKWPLSRLLVYGSLNSDGESHRGTSGNSNGTFKGGVGGGSGGSILLFLQWFLLEKNSSLSASGGNGGVYGGGGGGGGRIHFHWSYIATGDEYVHIASVNGTIVSSGGSGKNDGHCGEDGTVTGKKCPKGLYGTFCTECPVGTYKNVVGSNSSLCIPCSVDSLPNRAEFIYIRGGVTELPCPYRCISDKYKMPNCYTPLEELMYTFGGPWSFSIILSLTVILLALVLSALRIKIGESDITYRATNAIHNDGCSFPFLLSLAEVPGASRAEETQSHVHRMYFMGPNTFREPWHLPYSPPDAIIGIVYEDAFNRFIDEINLVAAYEWWEGSIHSILSVLAYPCAWSWKQWRRRKKNHRLQEYVKSEYDHSCLRSCRSRALYKGLKVGSTPDLMVAYIDFFLGGDEKRLDVASTIQKRFPMCLIFGGDGSYMSPYYLHSDTLLSNLLGQYVSTAIWNRLVAGLNAQLRTVRQGSVRSTLGPVVSWINSHGNPQLERHGVRVELGWFQSTASAYYQLGIIVAVNENFYKNLRHHEHATEFCERSRKNVAVPLQDFNQANLDQPCTSYAVSRKRLTGGVNGGIINEGTLKSLHYKRDYLFPFSLLLRNSRPLGYAETLQLLICIVLLGDFSITLLMLVQYYWISVGAFLAILLIPPLALLSPFLAGLNALFSRGLKRSSVTRIFALWNITSVVNIIVAIIYGSLYFWLSSLAVSSVHQVYNTKSFKSREDNEWWILPTILFLIKSLQAGLVNWHVANLEIQDYSLFSPDPDRFWAM

SEQ ID NO: 70375 - protein, 293 aa, Zea Mays
MTSHGSSEDGNALSHTDGLAREGFPRILWEVLQGAGYTTPPQYAVQQFEKHQVPRCRVRMTLEPHPLQPGWHSLDSESFGYRAEDTIEAIALHGLTTFCGFHPLELATHPIGLFPAEKEDDPMWKDRVEHAKDIWAIYPGQTAHLTVRCMNALYRLQVMRGEAMSHLMALLEATKITLDNREELVVDLSTEMVEKDLQVEQLSTDIQELEDLVGTRENTIEVLEVSSLTPSSSLPRLTSTWICITKRSRTWRPTRTSTSREEMSLPLVWTLLAQGDHLPPSRVLPRSLTRCSG

SEQ ID NO: 70376 - protein, 379 aa, Zea Mays
MWWRAVRRRWVATARPASSAAAGAEKSCRAVVVPRFGGPEVLEVRQGMPVPDLKPQEMRCGYGRSIFEPLLPLIIGRDISGEVAATGTLASSFSIGQEVFGSLHPTALRGTYADYAILSLDELTLKPSTLSHVEASAIPFAALTAWRALHGTARISEGQRVLVIGGGGAVGLAAVQLAVAAGCVVSATCGTQSIERVMGVGAEQAIDYTAEDTEAAIKGKFDAVLDTIGVPETERIGINVLRRGGHYMTLQGEAAALADRYGLAVGLPAATAVLLKKQMQYRYSHGIEYWWTYMRADAEGLHEIQRLSGAGKLQIPVEKTFPISHVREAHAAKEKKLAPGKCIHTCIEILDVSRCIFTTPMLFHSIKAPQCHVHLRRQF

SEQ ID NO: 70377 - protein, 190 aa, Zea Mays
MDGRPPPSKHCHSSFSTLVNIYNFGPTCQLSASQRIPCCRLIPLAFYPLPQSNPHDRHQLTQRASLQKLDGLPPRHRRRHRRRRPRSSYLRARRRLCFLRRGTRAPHHPPPRAAGSAGLCHSGPRASRPAVRGGGAPRHRRLRRRCVGRRIHGEEEHRVHGPHLYHAHRPAGERARAPPPRGRRVGSRHH

SEQ ID NO: 70378 - protein, 63 aa, Zea Mays
MLRPDTRSPATKQQKASKRLDLTPYYTVHTRRTKTSQGERGLNKEAELERFTALHWGCSCPDP

SEQ ID NO: 70379 - protein, 763 aa, Zea Mays
MGRDISQLLFNYYKIINFGEDNGSHLTSSKNTNSGEAEVLGSTCRSEESLYFRGPGQRKIKPARVGGFIYDGNEVDLDASKDADFSMEPCSKSKKKSLKKTVKPRDEVVAVNGRNSTGNVKASLSSNEQNKSLPLITAKQYACRAAHLSSLVVSWSPVVSLSDRTSCLLRHWCILAVGSKSGNISFWKLYKPEYYTIDAGVVTSDPMLIGVLHAHESWVNAITWQVLSAGSSKSSLLLATGCSDGSVKIWLGNIEGLNQCAIGEEVPFVLVAEVAANLSAPVSSISLGIPARSQHEVSLAIGRVSGLLEIWIWNASTNKIESSSAWHAHDQVVTGLRWAIDGNCLFSCSQDNSTRCWISHENHLEEFFLHSEFSELRESEDLSKVSDRCYGLTLSPGEEIIAVVRSLDLNLLNQMYQVRTQKAVVEFIWIGGQFVGIPLDGSIDICSPQSADLSSSNLMWWGSNILWSLKKYENVEKRLVLWDVVAALQELKKTAPAFLETLVHSWASALFAGDSQCVSITAQSSRSMHDMMPHVSSRKLHLLNIICRKVMLGNHARHGPGAGNNSNDGTTDFWSTLLVASETELRERLVGFTFAAVVKRTACLFNGTSTANCWFPVGVAQMDSWVSMNYEKVHGQLQSIRSKIKELGSRIDGYSDVESCPYCSSPVRFESPDVAICGERHTLSRCRTSMTLCSVAQPVWHCSCCGGTVDKLLPESFFTMPLDAVRDDKGSLDLSAASAPLCPFCGVLLQRSMPAFLLSTSPV

SEQ ID NO: 70380 - protein, 182 aa, Zea Mays
MDESMMDLENEAVLRNDCEKEAVLRNEFCQIRNKEAKGYRHKVVKFWDLLSLVYNKDQANGEGAKTTAESSKEMAKENNTRGKDAPYSVSSSSSLKRQRSDDSFNSIWCDKFDMLTSALKDDGPKLPSSVEVLTALQEVEGFDEDTELELYDILTSNARKFESMMALPMERRKRWLMMQLRK

SEQ ID NO: 70381 - protein, 223 aa, Zea Mays
MAANVALVLLSSCSPSTSAAAASLLPRRRFLPSRRRRASSRATTIMSALGDDPIREWILTEGKATQIKGIRSIGGGCINSAQRYDTDAGPFFVKTNSRIGPEMFEGEALGLKAMYDTKSIRVPLPYKVGSLPTGGSFIIMEFIEFGRSRGDQIWEGSLLKCIRLLNLIKDMVSRLTILLEALHKLTLGLMTGLSFTPSIDWVTSWSWHRDDMEIRPYSKKVSG

SEQ ID NO: 70382 - protein, 1054 aa, Zea Mays
MANNRAASFAKNNVSAAAAINSSSLAPPISNFASASLVKSLNYVRSLVARHTPKLSFQSIVAAKQSLPSLSSFLNRSLLSQLTPEVISNREHLESKECHSSPDFISSASEKVDVGEPVDDSKYISFDILSWRWHVYGERQSSLSAKESSDFVGLQDFHIHGFLEVGAAALLVGDMDAKINDQQWKYSVIQEFPDIDLLQPSSSAASTFASSQSHLKAITASKRMRSAPNQVWMNIPINTFQPRARPLFQYRYYSEQQPLRLNPAEISEVIAEVCSEATSNANQLIVPSRLSTQSRQPSADVAFSVLIKLVIDMYMMDSETAAPLTLYMLESSARTKALDLILNLGVHAHLLQPMVIGDAPLIDKSESVNRSYLSNEYGSSINEPREAEPEVEQKISPAIDQFESWLLKMLFEVLLLLVQIEERQEIVWASALSCLFYFVCDGGKIIRSRLGGLDIRVVKTLLEISVEHSWAKVVHSKLICMLSNMMYQVSDLTQNGVSDTHFVPERIDLLGGIDYICLEYSRANSREEKRDLFFVIFDYVVHQINEACLAGGISTYTYDDAQPLASLLAFADAPEAFYISVKHGVEGVGDMLRKAISAALSQSAQYDQLNVLLDKVMRKLDGTASTFSRIDNEFSYMIQVTKSCKCFGSIKDGCDDADVALRARLCWATLHSLLHSHISSYRHHGYIWLVELLLSEISEETDGSVWSKIQKLQEEIEVAGSQDLSCSEVSLPVCMLCGLLKSKHNFIRWGFLYVLDKFLMRCKLLLDDNDMQDHTTADHNKNCLDKAFAVIDIMNSALLLVVQNNETDHINILKMCDMLFSQLCLRIPSTNAMQVRGLQSLGQLFGYTSKNIDSHLETLASHQSIGNKNICRSETLQDIGIDQSGQSTSFCEASMAALLLRGLAIAPMQLVARVPTSLFFWPLIQLEGAASDDIALGIAVGSTGRGNLPGATSDIRAALLLLLIGKCTADQEALKEVEGNEFFRGLLDDTDSRVAYYSAAFLLKRMMTEEPEIYQRMLQSLISKAQQCNNEKLLENPYLQMRGILQLSNDLGVQ

SEQ ID NO: 70383 - protein, 353 aa, Zea Mays
MTGSAASLGLRSGSYGSLAAAAVVGSGGRKAGATACRTLRVEKERLHRALRLVGRRRTGVLLLLAVASAALFCSLFAVVKDDANSTSIVNNYEVPNAIQKSVYPSRTRPLMMSGNQESTSVVNKIDFPNRLHLSFANFTHPCEGFSVPPPLVDKKRTGPRPCPVCYVSVDQAFALMPLQASPSPVLKDLNYVSEDGVTANLSNQGSGFGGHPSLDQRNDSFNINESMTVHCGFVRGKKPGQGTGFDIKDDDLLEMEQCHDLVVASAIFGNYDMIQHPRNISDFSKANACFYMFVDEETEAYVKNSSSLYNNNKVGLWRLVVVRNLPYEDPRRTGKVPLEEEYHFCNLSALQTL

SEQ ID NO: 70384 - protein, 152 aa, Zea Mays
MGWQNSDPSTDFRAAGFMSLENLIYFARNYPDSFHRLLHKADGKRAEWEYPFAVGGVNISYMLVQMLDLQSGKMRTKAGVHFVQLLDDDGVAFDNLFCVAFQVLDSQWLARRASYMEFNEVLKSTRGQLEQELTIGGISRIQDMPSFRMLRR

SEQ ID NO: 70385 - protein, 219 aa, Zea Mays
MTSVSELTLVLASGASMLPHPSKVRTGGEDAYFIACDGWFGVADGVGQWSFEGINAGLYARELMDGCKKIVEETQGAPGMRTEEVLAKAADEARSPGSSTVLVAHFDGKIEKGDDPLKLVQKYAICLQEGDVVVTASDGLFDNVYEEEVAGIVSKSLEADLKPTEIADLLVARAKEVGRCGFGRSPFSDSALAAGYLGYSGGKLDDVTVVVSIVRKSEV

SEQ ID NO: 70386 - protein, 207 aa, Zea Mays
MDLWERARAFAGEAANWSQELSAEATKRSSALVSETAKKSKEIFSETASKSLEIAAEATKQADLLAGQIKHLASDIPVPSIPPIPAIPPIAATASSEPDAAELERYGITDDLREFVKDMTISTFRDFPLQDEPEMSDVPTVSNVRQDLSEWQARHATLVLSAVKEISKFRYELCPRYMKERKFWRVYFLLVNSYIAPPVRDAQTFTR

SEQ ID NO: 70387 - protein, 83 aa, Zea Mays
MLVCLSSSDSSGSTTVPCASVSGRRTPAPYALAHLPALVVLAGTLCSSRLPLRARRTSSPCPHLRISLAERLSASVLACEFVI

SEQ ID NO: 70388 - protein, 69 aa, Zea Mays
MRKTTQVDPKRRLLRMMMLVDEPARSSARTRMIVKWTSPNNTNLVLFRQAPVHLPPPCVLKSLSPCLMH

SEQ ID NO: 70389 - protein, 352 aa, Zea Mays
MGDGDYALHPEPGADDVGVCWPGELDEQLVTELLSDDSLLLGALQQDPAAVDSEHYCSRDTGASSSAPAACTGGGGTVAEHQELLPQPEAVSRALCSVYTGPTIRDIEKALSTSRPPYPWSSRRYSPMHLGRFGAAGRAPERHTTKVRSCGGKTPSDGYRWRKYGQKSIKNNPHPRSYYKCTSSRCGAKKHVEKSMDDSEMLIVTYEGSHLHGPQPLFPRRQWLSVDLSGAGVAASKTKQQQTRSSSPAASATLASDDGGGGWPPSLQIMTRNAETRGGGLTADAGESETTPGLQSGRTGVTADSCDDGSTASVPPPPQTAPSFHCDSPPTTWSWSCLDYTLAWSPEAPLLQ

SEQ ID NO: 70390 - protein, 53 aa, Zea Mays
MDLLTMSESTRSYDFDKAIRFEPFIEHHACVDLPKIKQSIFGKNIGADLPNTR

SEQ ID NO: 70391 - protein, 509 aa, Zea Mays
MDIKVCGVCGSGSNSALIVKCVRCNDYEHRYCMKVVARVSPQEWYCAKCQEHTNRGPKPSQGGQTELQKPCHGRDMTSERETSKLHLSQSSVVHQIISPKSLNRFENAKVKFISSEEVALLSRERPPSVTSRFTLSQPSKASSPPTTKHLSNMNCVSPSRSDKNVQALKRCADASHSQAELEDRSYSAMQQRRVHPASPSSMKQPSNMKSTSPGRRDMQVQNQKRYAPMRESQPHVKQLSNRTATQVHATKRSATSSHDQANIDDINMDCEARSGGSVPMMHECRTSESVKVKMDSLIEHKAREKKIVNADKGEIKSQTELEPREKGTLCTSDEDIGCKSEIGSLNQNKDVIVTMVSTVQYSRRPAPTNCWRGCFHVFNAGEKLNLGEFKAYFPSKVSSRVIDIVKMMPTVLQLELLHRMDDWPKSFETMHPVHEDIGLFFFPNKPDGCEKKHSNVLEAYNNFVLRAYIHDIKLLIYSSEVLPPDSQWIDGENYLWGLFVSSDGKSGPS

SEQ ID NO: 70392 - protein, 1418 aa, Zea Mays
MRKSSNKLSASVYSAVQKLCLILGFLKELLTTVRLSDGCILQLAKTCFTTFLVDNMQLLQLKAIGVICTVFSSYTQHRSYLVDEILHLLRKLQFSKNAVRTYHLADEDQKQIQMITALLVHLVQFSAIVPNSLKGTVDWTTIVDASGDADYYPIKCHEAATEACCRFWTDVLQRFTAAKSQDMSETKGIIDNLVQDFLMILNLPEYPAAASILEVLCVLLLQNAGLKSKDTNVRCFAIDLLGGIASRLKHDSVICSEEKLWILQDLTDAGSDGSKILKNKCCVCLGGRGINIACNECGRCFHSDCMGAASQDNLERDSVCPLCFCKQQLNVLQTYCQSQIKENGKKTAASTSKKSAKPAEVPAVDIIQQILLSYLQESGPQDDGNLFTRWFYLCIWNKENQHSQEEIIYYLARLKSKEILRDSGNGLAISRDSAKKICLALGQKNSFCRGFDKILALLLVCGCFQILKFNLYVLELIPNAFQASLRENSPVIRAKALRAVSSIVEADPEVLGDKRVQSAVEGRFCDSAISVREAALELVGRHIASHPDVGLKYIEKVAERIKDTGVSVRKRAIKIIRDLCASNPNTDTTHAFVEIISRVNDEESSVQDLVCKTFYELWFEEPTGSHKHLVADGSSVPMEIAKKTEQIVDMLRKMTNHQPLITIIKRNLTLDFLPQSTKAAGINSYMVASIQKRCELICKRLLERILQVEEGAAKEMEIHMLPYIVALQAFCIVDPTLCIPVTDPSKFVVTLQPYLNIQVDSKSAAQLLESIIFVIDAVLPLIRKPTQNVVEELEKDLKHMIVRHSYLTVVHACIKCLCALSESAGRGPGLVENLVNIFYKHLSGANSDSQLLGRSLFCLGLLLRYGYQLMQTSENQLDFPKIINLLQRKYLLRDDFSLKVRALQTLGYILIAKPEFMLQKDMLKLIETALSSEVDYRLKIQGLQNLYEYLRDAESQLTAESTVKPPVRCEINGRSKVPVAAGAGDTNICGGIIQLYWSSILERCLDTNDQVRQSALKIVEVVLRQGLVHPITCVPHLIALEMDPLEGNSKLAHHLLMNMNEKYPLFFESRLGDGLQMSFKFFESIVSNHKMAANIKSNPIAFVKPGISRIYRLIRSNRNSRNKFVHSIVRKFESDSRSRSTVSFLVYCAEVLASLPFTCSDEPLYLIYDINRIIHLKAGGVESNLKRWTSMSQSQNTVDMPTLPGERHVVMQEPGGYYDNVGYAHERVNANPCSTSDVDMAKVQVDVDMAKVQGDCLDAIALQLLLKLKRHLKVVYSLDDARCQSFSLKEPPKSGETFSRQNIPFNVSSTNISLPSCLQDVASVYQDFKTVLHEDSMDFAVFIPSVQIRKRPTPRNTTNPTPRSTTRVRRTAASSVTKARGGARGDDSDDSDDDDWTGGPRVLDFSGGGRVTRQRVQV

SEQ ID NO: 70393 - protein, 263 aa, Zea Mays
MFSHGADSAHDAGAVGVSSGGATVPTRFVWPYGGKRVFVSGSFTRWSEHLPMSPIEGCPTVFQAICSLSPGIHEYKFFVDGEWRHDERQPTISGEFGIVNTLYLTREYNQINTLSSPSTPGSRMNMDVDNENFQRTVTLSDGTVSEGTLRVSEAAIQISRCRVSEYLSLHTCYDLLPDSGKVIALDINLPVKQSFHILHEQGIPVAPLWDSFRGQFVGLLSPLDFILILREKSSLKHTLYLHGKRLSGKLMEEMMVSGDRNSI

SEQ ID NO: 70394 - protein, 69 aa, Zea Mays
MHITVITFDTHTSEIKSGRLYKHSLPFQNSSFTCFERIIFITSTDILKVHNLLQKQEGRNPPKLIHKPS

SEQ ID NO: 70395 - protein, 112 aa, Zea Mays
MYTQGYAAWRMLVSMSLVMIHCGTTLMCDLPWSPPLKQFLCCLSSDQATSIISVGSKGHTTFMCDLLSFDFDGDFTHTSSLYILCVKVKPWSFLVLQDNQLVPKMEICFPCC

SEQ ID NO: 70396 - protein, 68 aa, Zea Mays
MMLPVPARKPRPKCMLPFPCSWFSWRNGTWQIKYLYIAPRSHSFLPGGCNCRMLSSSLHGKKNMPALV

SEQ ID NO: 70397 - protein, 144 aa, Zea Mays
MARPSLLSARLLLLLPSLHGYLPHPLAALLSLSLSLVLSSPPRPALCSLLSAGAQAPCSTALSPAYPSSLLPMATAAAPCSATHFPVLNLQLGYSAPISLAAPCSGCCSPEFQPWPPSLVPAPPCAHPGPARILAVDSVRELTT

SEQ ID NO: 70398 - protein, 66 aa, Zea Mays
MNSMARSRPTSRDTIGSSKNGRAEEDGIRHRWDKSGVRSHQSTRSKQRSLACGHGRKTRRETPSCG

SEQ ID NO: 70399 - protein, 898 aa, Zea Mays
MARGGGGRSKKEDEEELRGAKRGYKEASAEGNREEEARWANVIGDIYKRRCEYVEALRWLRADYEVSVKHLPQRHLLPSCQSLGEVYLRLGRFSEALTYQKKHLQLAKESDDLVEQQRATTQLGRTYHEILLRSENDHSAIRNAKKYFKSSMKLARILKERSPSQKSDFLKELIDAYNNMGMLELELDNFEEAEKLLIQGLKICDDEEVDSYDDARTRLHHNLGNVYTELQNWKKARGHIEKDIEICRKIRHLQALEVARSLEDEDALIEQIHQNIETVTKAVEVFEQLKEDELKLKKLIRDTSNARGTSKERKLLLDQHAWLDSLIEKARMICAWQKGQALAKVNIGNVLDSCGDWAGALQAYEEGYRIAVEADLPNVQLSALENMHYSHMVRFDNIEEAKKMQEKIDNLKQTLNQCEARDTVSDYCSETDTEGGCTSDNTLDAQNDHGQAANNYEEPDDDVTLASLVQRSGSSSKIKVPKIRNSSKKFDELCDVTEDIHNSSKKVDELGDMAEGTRAVLSRSRSDHSVGRKRVRVILSDDESDENHENVQFKKTSTSPADSMSVSDHGASSSRNQDTLQVNQTRDAPYPAEESICSFKSSSPIDHAFEGIGLGASSAGKGPTSKSAASFSKLSTPGSNSLNESQNAVGSQSKDADNHFWAFRIGGHLVYLDGRACVHEGAFSIDSLKVEVACVYYLQISDEKRAKGLLPIIGELKFRGKVLEDAVSIYYDDQLASEQKCVDVVIDDWVPKQLMKLYVDFCMKSLEAPNKKLLTKLYNLEVSEDEIIVSDCGLQDMSIVPFLDALRSHKTIAVLDLSHNLLGNQTVERLQHIFASSSHTYGGLTLDLHCNRLGPTALFQICECAVLTDRLEVLNLSGNRLTDACSSYLFTILKKCKA

SEQ ID NO: 70400 - protein, 71 aa, Zea Mays
MAALPRSPNSARLPLSLRDARWIGESMAAWQGGLSQRFLKVVSYYGLTTLPYKLVCKLVGANLRRMLWNLT

SEQ ID NO: 70401 - protein, 560 aa, Zea Mays
MDGCDCIEPLWQADDLLMKYQYISDFFIALAYFSIPLELIYFVQKSAFFPYRWVLIQFGAFIVLCGATHLINMWTFTTHTKTIAVVLTVAKVATAVVSCITALMLVHIIPDLLSVKLRERFLKAKAEELDREMGIIRTQEETGRHVHMLTHEIRSTLDRHTILRTTLVEMRRTLGLAECAVWMPSRSGTTLQLSHALHTNAPLGSVVPINLPIVATIFNSNRAERIPHTSPLASVKAQKSKYVPPEVVAVRVPLLQLTNFQINGWPELSAKAFAVLVLMLPPDSARKWRPHELELVEVVADQVAVALSHAAILEESMQARDLLLEQNIALDAARREAEMAICARNDFLAVMNHEMRTPMRAIISLSSLLLETKLTAEQRVMIETILKSSDLLETLSNDVLDISKLGDGSLELEIAPFNLHATFTDVVDLIKPVAALKRLSVMVHLAPELPTCAIGDRKRLMQIILNVAGNSVKFTKEGHISVSASIARPDSLRDPYALDLHPVLSDGSFYLAVQVKDTGCGISPQDMPHTFTRFAHQQNATNKLRSGNGLGLALSRRFVD

SEQ ID NO: 70402 - protein, 278 aa, Zea Mays
MAAHAVTPLTICCLRRGVPLNHSRRLLAVAAAAPESPAPTPAPSQLPLPPVPPRKGYFPKRGETVVLLCDGALPGERLIARVRRLRRGAFAEAAKLRTLEPHHDAIEAPCPLAADCGGCKTQSLAYAAQIRHKHHQVRDLLVNFGKFDPKRLESSEPDDILKPTVQCDEIFRYRNKMEFSFGTKRWVQKELKDKGEEVEVKQETNETDGYALGLHAPGFFDKVLHVQKCFLQSEPADKVLAVVQETWMDPAIGLTPYDVHKHVGFLKHLMIRTGRLVS

SEQ ID NO: 70403 - protein, 175 aa, Zea Mays
MADYDQEQEMEVEALQAILMDDIKEIDPSESGIATTARCFQILLSPQDDDFDESAYVPVQLALIFAHTEKYPDEPPVLNVKSVRGIKPHDLASLKEKLQREATENLGMAMVYTLVSSAKEWLSEKYGQNGGDEEPEESEAEKEEVIIPHGEAVTVESFLAWRERFEAELALQRAK

SEQ ID NO: 70404 - protein, 537 aa, Zea Mays
MRAGAYTVHQSLTAEAAAALQLSLGLARRRGHAQVTPLHVAYTLLGGSEPPPSSSSPRLFTTIAASAPAYGLLVRACARSRRQTHPAQQCRALELCFNVALNRLPTGTANAGGLGSSPSPATSFAASLLQQQPASPTLSNALVAALKRAQANQRRGCVELQSQPSPPPPPPGQQPHSTTSPSHQQQQPVLTIKVELDQLIVSILDDPSVSRVMREAGFSSAAVKASLEEESAAMLAALGNHQVHHHGASSTPPPPPPSSHHPPTAAGLVLPPRHFFLLDPYGGGGFPAHAGACSGAPWAAPFPSVHSRHPPEPDDVNSEPPCEAEAEDVRAIVEVMTRRRGRLRRANPVVVADSAPAAEACVAELVRRVERGGDVPDELRGARVLRLHLSRARVRLMTRADADAWAAGLRRSVAGSNSTGAGGGLVIYVGDMRWAVDDGTDDDDHARGLQGPSSSGSYSPAAHLAAELARLLADLRLRAASRAWLLAAASYATFMRCQRSSLDVTWGLQPVSVPAGAGGGGGLGLELGPRAATARMI

SEQ ID NO: 70405 - protein, 1163 aa, Zea Mays
MEALNELCDLVAAHPDLLLADKLAWLSSRCAAAPGAAAPQRASRAHLHSLLALARLLPAGGAGAGAEGDAAPPAPLLFFLASHAFLSPAFWPQSFAPAPFLARLLPLLAAAPSSPALSSALSAALLAALDVADPTSAPLARAFLSAAAAAAPLPLLPADAAPIAARLLLEFLGSEEEPIRAKGKGEDTLGEENGGAKEVVRRFEEEEVDELERKEVAFRLTVHMLGGEGGLETEQIGKVRNAAARQVRSLTDFLKIRKRDWREQGTQLRARINTKLMCCQAAVGVLVRSVSTMDTDIKSSKDMLQQTLAWFIEATKSCILSSWRKLKICEELFCTLLNGISQITVSRGGQLLPVLLIPLKPLVVSTCSQADMAGSSPGALFEAVVKLSCEIIEFGWTKDRALVDTFVMRLAAYVRERNDYEEEDGKGKEAVPVIRLNVIRLLAELCVCLKKWEVVDMILPLFIEHLEEGDASSPSSLRLRLLDAISRVACLGFEKSYRESIVLMTRSYLDKVKALGASENNTVPSEATTERTETLPAGFLLVASNLTSTKLRSDYRHRLLSLCSDVGLVAESKSGRSGADLMGPLLPAVADICSDFDPVSTVEPSLLKLFRNLWFYVVLFGLAPPIQNNEAPTKPVSTSLGTAESSSAIALQAVAGPYMWNSQWSVAVQRIAQGTPPLVVSSVKWLEDELELNTLHNPGSRGGNGNENSAVGQRAALSAALGGRVEVAAMNTISGVKATYLLAVAFLEILRFSCNGGILSATSTLNRSNSAFSCVFEYLLTPNLTPAVTQCLTAVAHRAFETVLSWLDDRISDIGEGADVRESVLSVHACFLIKSMSQRDEHVRDVSVKLLTQLKEKFPQVLWNSSCLDLLLISVHNELTSGPVSDPAWVATVRSLYQKIAREWLTSALSYAPCTTQGLIQENFCKPSGVQRTQHTADVVSLLSEIRICSGKNDWNGIRTANVPAVMDSAAAASGAKKEAPDFTLEVLSTAVVSATVKCNHAAEKQPIDNSQFRETCSQATALLLDHMVSDSRANLEGFSQLIRLLCWCPAYISTPDAMETGIYIWTWLVSAAPSLGPLVLAELVDAWLWTIDTKRGLFASDMNYCGPDAKLRPHLIAGEPEAPPEKDPVEAIIAHRLWLGFFIDRFEVVRHDSIEQLLLLEV

SEQ ID NO: 70406 - protein, 533 aa, Zea Mays
MAAPTVLAFLPLPLLLLAAFSSASASAHPNSFRPIVPLRLQALLQQQQRRRASSDAKLVSAAADGTNSTAQPFTTHYFPQELDHFTFTPNASMLFRQKYLVNDTFWRRPRRGGGGGAGPLFVYTGNEGDIEWFATNTGFMFDIAPKFGALLVFIEHRFYGESLPFGDDSYSSAETEGYLTSTQALADFAILITGLKRNLSAETAPVVVFGGSYGGMLASWFRLKYPHVAIGALASSAPILQFDHITPWNSFSDAVSQDYKSESLNCFSVIKAAWDVLDERGSTDTGLLELSKLFRACKSVKHADSIAGWLQTAFTYTAMVDYPTPANFLMDLPAYPVKEMCKIIDGFPAGADILEKVFAAANLYYNYTGDQACNQIESDSDDSSSSLGLSGWGWQACTEMIMPMSTSNASMFPPSSFSYEDTSNACFQSTGVRPRPHWITTEYGGYRIDKVLKRFGSNIIFSNGMRDPWSRGGVLKNISSSIVALVTEKGAHHLDLRFATDEDPDWVTEQRRQEVEIIEGWIDQYHRDMAQVS

SEQ ID NO: 70407 - protein, 52 aa, Zea Mays
MGRWLLQVENHCSSQSNMLVRLNLLTAYNQVRCNKNTRKLSSQNLLWTTHYL

SEQ ID NO: 70408 - protein, 1242 aa, Zea Mays
MRDISLRTNSFSNKQRDAQPQNCYTRTRVPSLRKSRSSLSLESRKAQGSDNVWLHSGEGTSNQPVTLGASNGNRMLNTPAEVDSTSNREASENGTTETELKSNGTSDLPMNTAVNFKRKRKSDRKPGPHYRDCTTPNKDDQLCAEYSEILPDSPNSKNEVSKSDGDEHLPLVKRARVRMGRSQLEDSPVDEIDVSNKKPELATALDQCDRNGKPASPANDYSADQVSAVVSSAPNLSCKLDTTILSKEGHLPWKNKEYHPKILALDVEAALPPSKRLHRALEAMSANVAENTKNIPEVTGPNEMTLNGSLLTASSLSNKSADAVVTVSNRPVIVQSPEPSLDTQFVHNPSGKCTSESILQNNSIPDSASVPSKENDHIVLKGDICEETLMDTKTANGSWDCSELNNDSCGKTSALCMKLNRPALNVTQATSVPDRLSSSLEKASENVAASGVKETKTFGSAVCDVDRSAEPIDRSNNNVTSNTMRHSETIVADSVNNVGDTASNSSLATKSSSIQSDADTRTSELHTFSSLALKELNHRKIKDRSTSPDSMPMKELIAVAQARRFSRSTSFPDNFLNAKSPFDNIQQKKLAAHGANAARRSFKDFLSTLTRTKESISRATRLAMECAKFGIAGEAIDIIVEHLEKESNLYKRVDLFFLVDSITQCSRNQKGGAGDVYPSLIQAVLPRILYAAAPPGNSAWENRKQCLKVLKLWLERKTLSEYIIRHHIREIETINEASFGSSRRPSRTERALNDPLRDNEGMLVDEYGSNAGFQLPNLICTKVLEEEEENSSEGRSLSFEAVTPEQDAPYNDDNEESQMPVEKHHHILEEVDGELEMEDVAPPSDIGATTKCQPEQSDTNRAPSDQRPSDAGPPLPVDRPPSPPPLPSSPPPVPVPQSAQMQPKLQMASDPMAPHPQRATYSVQSQQQHSIAEHPVQDMEGNKIRYHLPHQWHHSILLVPMAVSLLPQHLTMGTTIIGLQPHPCLTRDIISNHHPLHRLQINSLLCHQNTNIGHITGVITVHRIPRDIGTMDMIEVITDMIEGIMDMTDNTIMMIEDTTTMIEDITMMIEAITLMIEDIILTIEDITLMRELLGGQCTMMPLTREDILFLQVLLGFLTILKLHQPQCTMGDHQILRQGLVQAGLGRLGYLITILPRDILWSLQFHIQLEVMVDGDLDNLFRYRSGALMLSLVCGGLTCGRVCLVSLLQVEGTHGGGALQESGSWYLPPCTDVSHGFYGGRAA

SEQ ID NO: 70409 - protein, 858 aa, Zea Mays
MGSDREGRGSEAVAASKPRKRQLVMESSDSEADEFCISTRQNASGAASLGNAGVSSQGSGDRSEEKPVTSSPEKLPGVKSSDVDGSDKKTGVQLESSSSQPAVKRIRVETVHGDGNGCSGGASKCGTGGKMLPRGLPAWRFERPEVRGGRVLDDKGGVSMKASSASKMKEQVSSLGDKRQAELQKHERRTPLKTDQGKAIDSGQQEVLRLQGKRGVLRILPKNDKVTRDTGDGKILSRQTEVDEETGNGRIPTKRGVLKLLPKNNGAVMESNECKLLSKKVKVDEETGDDKMPMKKTKVVDKETSDGKILAITTNLDAEFGGHKLPMKNCTVDMETVAGKFQQKNSKADGETKGRYKGYEEKSGAPAEFQKHDANGEKRVLGKLLSPVALRKSDPSVVGVSLGQRMKQQNSKQQLKNYSLSLKDDSTKSSEQKNLKKRLLEHKGSSESLSKKAQLKAVDQQATSGPVLNKLEKKPRGGPLNKHKQDLRNKIKHVLLDNGWKIDLRQRKNKDYEDSVYVSPTGTGYWSITKAYAVFQEQFQNMGRSSKLNNTKPGASDAISKDDLALLKKNIVKRRTNKEICGAEKKPGVSRNRSSKDILANRDFRNKHQNKEDRVKIKDRRCGLLVRGSTHDTEDNMDGYIPYEWKRTLCSWMIDLGVISEDMHVKYMNSNRTREMLAGKITREGIFCGCCSKILTIAKFELHAGSKEKKPYANIFLEGGKVSLLQCLLDAWEKHTQSENKGFYKIDKGDDEHDDTCAICGDGGDLVCCDHCASTFHLDCLGIKLPSGDWYCRSCLCRFCGFPQEKPSSSPELLLSCLQCSRKYHQTCSSGTGTDSGCTMPGTSIDCFCSPGCRKGFY

SEQ ID NO: 70410 - protein, 511 aa, Zea Mays
MEKLKSHIDALNLKYLQNLNDFTKFLLLGEDELAGMPFEFLKDLEKADGKFKVPLTSYHVTPVLEHCKVGSTRKQIAVAYGQKGGKDNVAILENLVQLRHKFAKLLGYTNYADFAIEPRMPKTSRKILEFLEEMSEQLSDVANRELNILKDLKIKEEGNAQFGMEDLLYYIKRAEEFKVDLDVGEIKQYFPVGLVISGMLKIFQDLFALRFDEIKDVDVWHDTVRVFSVWDASSSDLLGYFFLDIFSREGKYAHTCVVTLQNGCLCSNGTRKVPAAVILSQCPKEFDGNSALLRFPEVVRLFHEFSHVVHHVSNRATFSRFSGLRLEGDFAEIPSLLLENWCYESISLKMMSGFHQDITKSISSEACQSLKRRRDLFAGLKMKQEILLCLVDQIIHSSENVDIDDLIKDLHPKVMLGIPLLEGTSPASSFPRIAFGYDAVCYSYIWSEVFAADLFVSKFKDDLLNQHAGLRFRNKVLAPGGSKDPLEIITDYLGREPSLQPFIQSRTRNSL

SEQ ID NO: 70411 - protein, 449 aa, Zea Mays
MAEVLRSRVEDDGNDILCLPIDFQQLQELRMFIEDKLNESPKEALLCMGVAAHLALCSDKDNKRNKINIRLYNTGAAIALKKLKAAFIKKLVTVRGTVLKVSTVKPLVLWLKFRCMKCRKEIPRVFCDGKFSPPMSCTIQGCKSRSFIPDRSSAQLMDFQKIRIQELASADNHEEGRVPRTVECELTEDLVDCCIPGEIVTVTAIVKVLNNHMDVGGGKSRISSQGLYYLYLEAVSVRKLKSHAVSDKEIQASGICHSQSSTVNDDFAVKYKEKYGTDVFRRILQSFCPSIYGHELVKAGITLALFGGVQKNSMDQNMVPVRGDIHVIVVGDPGLGKSQLLQAAAAVSPRGIYVCGNTTTKAGLTVAVVKDSMTNDYAFEAGAMVLADRGICCIDEFDKMFTEHQALLEAMEQQCVSIAKAGLVASLSARTSVLAAANPIGGHYDQMSH

SEQ ID NO: 70412 - protein, 108 aa, Zea Mays
MDAEAGEAGVQQPAGAASTSTAAVPFDRSSSRLGAPGAESFDGALRELKDLRSQLHEAADCCAKAFLSTDKKKISTLMHAKDSGGYKGLHMRCGGSCDRSPGDSFVQA

SEQ ID NO: 70413 - protein, 158 aa, Zea Mays
MAGRGGGSKSSLYAALGVASDCSDAELRSAYRKLAMKWHPDKCAGAGSSGGGADAAKARFQKIQGAYAVLSDPNKRILYDVGAYDGEGDDDGAGEILGDILEAMSQAGPAADNGKGESLEDLQRQFEELFLRPSPSSFSPQNDAAGKSASKSRPAGRK

SEQ ID NO: 70414 - protein, 398 aa, Zea Mays
MLLEELNKISGAIGKTVEDLDVADLNLGKYESFNPSKSWLPNSSKVFPETGKGVGQLAGILHDFLERPNDMVNGTDDSLLYTLPHEELFELFLTLSGQLSLLWNAFLKFHRLNKTKILDYLHDAWAIGRKAEWSIWTIHSKIEIPHRYLQSMSDDSPHRYSLRVSGSRKFHDDHVQSSASRAELHRKSIAQMKINPHYVQDMHIYGDPSRVPVVLIEQHVMVVPQHSSSKDMASNVSEQKDTIVVPKLQGEPLVPKSSAGKKSGRILRAVIFVHGFQGHHLDLRLVRNQWLLLDPGADCLMSEANEDKTSGDFKEMGSRLAGEVVAFLKKKMDKLSRYGGCKELKTCIATILEEPLHLHVNIRASLGLLVQFKFFVQFWTLAAEKAQGCAMHPSTHFQ

SEQ ID NO: 70415 - protein, 61 aa, Zea Mays
MLAEESRISCVDTGIHHTVYIFLVRFGVGVLIKGYDEIVLRRRSPLSAPSIGDDSKSVNEQ

SEQ ID NO: 70416 - protein, 225 aa, Zea Mays
MENETTETSTSGCGSLILEMGVLSRLTGDSRYEAAALRALRKLWSMRSSLNLVGTTLDVFTGKWIQYSSGIGAGVDSFYEYLIKAYILFGSDEYWDMFHSAYLAVQKYFRHGPWYHEADMRTGEATHWQLTSLQAFWPGLQTLLGDVTAANLSHREFYNIWQRFGVLPERYLLDYGMLHPTEKYYPLRPEFAESTFYLYQATKGAPNTHQKDIFVLSSSSSHVFI

SEQ ID NO: 70417 - protein, 432 aa, Zea Mays
MPNGGGKRWLLLLPLSRYVEVDEQQGVQLFYYFVRSERDPYEDPLLLWLSGGPGCSGISGLAYEIGPLKFDARGQGEFPTLLYRPETWTKVSNIIFVDSPVGTGFSYAKSEEGLETGDTKQVKQLVIFLRKWLQDHPRFVMNPLYIAGDSYSGLIIPTLALEIDRSIELGEKIFSGLKGYIAGNPLTGGQFDTDSQIPYFHAMGLVSDELYKNARENCGGKYSAPLNAVCAEAVQAINNCTRDINKQYILDPACPDDDLLSPKTVAETDGTSRLMLESADFLLGSKCAEALYILSYAWGNDDTVQESLGIRKGTIGAWKRYSHALPYNYDIQSVVDYHSRLATKGYRALIYSGDHDAVVPHVGTQAWIRYLNLTIVDDWRPWYVGGQVAGFTRSYASGLTFATVKGAGHVAPLYKTLECQKMFITWISGNPL

SEQ ID NO: 70418 - protein, 417 aa, Zea Mays
MQKSKNKAGRDWSKEENMHVRYAGVLCSPAGDTNGRWFIHACMHVGDAAGGGDPRGGPGDASEPERDVPQHHKQRRVPGRVREEAEERGGVPCGDQGRRRPVQRLQRPGLVPDVDHRPGQAHRHDAQPQGDPQDGGHHPRGNYRGAQAHPRRKDQGRRRRRGRRREPRRRTHRPAGERRLRLPTYQQHHQGHHTGHVRGRDGDVGVGHGVGDVGADAEPASDEEDAGADQGGVPWEDGCDGGRPVGEQPPVPEAGDQRGPPAASAGTAAGAPGEHRGVRAGRVHDPSKVTGHHQRVGHRPEPQVLGRRRRVQAGAIRGRLPRLHGQQLRVLALRLRPEDVPRLQLRPREHGARLRRPAVPLRLVAARGRQGCRHGGGAWTRCTPSHAANALRHPVRPGPRLTIGTYIDRHASSSRES

SEQ ID NO: 70419 - protein, 200 aa, Zea Mays
MSGSNFGDSMGWSSSGRSSGPRRGKRGGGGGGGTDKPKQPQRGLGVAQLEKIRLQSEMAEYFHPLGGQAPSLIHRTGSLSLQEDARASTSSLSSSPSSSFHAAAAISSAFPIHPNFAMPYGETDVRYSEFQAHPIIRSPVSSSAVYGTPHYGQHPNITLPLFESQVSSRLKGRHHDRSQSADSTSLNSDDPQDVDLELKL

SEQ ID NO: 70420 - protein, 206 aa, Zea Mays
MTLRVILSRLRLTPLIHDGHHLRRSLSAAAAKLPDELPPGAPAPTSDSRLFVAGLSWSVDERSLTDAFSSFGTVTEDGAQCRSSAKCRGGREPLHRPQACSLFDEIPVRDVVTCSAAIYRHARSGLFHESAELFVGMMRAVRIMYDKNSGRSRGFGFVHFSNDNEAKCAKDAMDGKVMLGRPLRISFALGRVRGASVIVPRLSTVK

SEQ ID NO: 70421 - protein, 304 aa, Zea Mays
MRDMKLERRRVLKRKEKSKLQDKETSLKKAAAKGSKAEQKAKKKQVEEEITRLSSELEANHAAELASFGYKPSGSSEKGNLDNLVKAIAGVSVSSNSDSAKLSKGARRREKKAKEEAAREQRIQEEQSNLVSDRMLENEKLERKLEPLGLTVQEIKPDGHCLYRAVENQLSLHSNGAARYSYQDLRQMTAKYMREHAANFLPFYLAEGKADVGPDPMASFERYCEEMESTAAWGGQLELGALTHCLKKHIVVYSGSFPDVEMGKEYKSGPGGSGAGGASIRLSFHRHAYGLGEHYNSVVPAGSS

SEQ ID NO: 70422 - protein, 484 aa, Zea Mays
MAGRGGAGRRPRAVFMAFGTQGDVFPIAALAAAFACDQQEYAVVFITHSAHRSLSAHLAASSVRYMPVSSPPVLAAEQLENISSDSIQSNHERESFSMRKKAIQAEHRKECLSFVEEVFGNDPSISGDFIVINFFALEGWHLAELFQVKCVIAAPYFVPYSAPTSFKRQFKQTFPLLYKYFQEAPANTVCWTDIIHWMWALFMESWGSWRNDCLNLSPIPFTDPVTNLPLWHVREESPLLLYGFSKEIVECPGYWPFNAHACGFWFLPMDWQFSCDKCMELSGNINSSFGGMLCANHSSLEHFLTRNAYSSRPIFVGLSSIGRVSTRLMLYVCVVLSCGIGGENVKIFRSIPYSWLFPRCAAAIHHAGSGSTAAALLAGIPQVTCPFMMDQFYWSERLQWLGVAPEPLQRQNLVPDNDDALSIHNAADVLVGAIRSALSPETKAQAARIADRLSSEDGIGEALRILKARVLTQNKIISSFIASK

SEQ ID NO: 70423 - protein, 115 aa, Zea Mays
MPASSVQLVSKVLSQSSSHQFLKSVGIKTPASSKSSSSNQSELREQLAAEATAAVQGELNQLKKKYEEAEEQQARTQRELEEYKKITEKNSKEMEETNVLIKKLLSLHGNTSSST

SEQ ID NO: 70424 - protein, 315 aa, Zea Mays
MLSMDKLPWTMRAPRKSVPEFYIDEVLPILMRRRALQLTKFDYRLTSDLDEDLQKLRCRVNFHALKFTSSIHAMGQKLVQKLRLMNTRYVAIHLRFEPDMLAFSGCYYGGGEKERKELGEIRKRWDTLPELSAEDERSRGKCPLTPHEVGLMLRALGFGNDTLLYVASGEIYGGDSTLQPLRGLFPNFYTKEKLAGDDLNPFLPFSSRLAAIDFIVCDESDVFVTNNNGNMAKVLAGRRRYMGHKRTIRPNAKKLNVLFQTRNQLSWDTFSRKVQRVQRGLMGEPDDIRPKQDDFHEFPSSCICSRKPGNISATT

SEQ ID NO: 70425 - protein, 567 aa, Zea Mays
MAFPADALVLEITDTSSSATAAAARAPSSPSPPPLSISDLALIESSSYFRALLGGSFSESGREHVRVGCNLEAAVQVLRYLFEPSESFNITHNNFLPLLEGALFLAVESLLVECQRWFGTIASQTSAMSVPLDFIIEVWYFAEEHGVTFVQDICQKFLAQNFVENMKACEQSNPNSVDGHLFILSKVKICLLPLGFAAGTMRHWFDFGNKIICTILDLLKDSLKTLLDAVDDGNLDRYCIRITEYSKNIVLSGCPQVTTAFLYISVLPNDLSVSLKRRIVSSYTQVDHQTFVLYEELEKATKTLSFKNVHMVDISKCPNVHFGAAIDWLKLGFPELRVFRVSHCLSFQFDDLLYLLMRCPWIDEIDMTIDTSTVTPRHSVISSSSEVLSKAKPNQKRYGIHCSAYDRQPNSVFLNISRLTLEGRNDIDDMDLLEISVLKNSLCYINIRNCFLLTDDGISNLLMKCTKIHSMVLSYTSFGNRSIQMLCAANPSGHNSGHAHVMASYMQELHLDGCKGIDSVALSQLVSIISITKFLSLRETSLTDGALCKFVGSSLEYLDVSETVVRY

SEQ ID NO: 70426 - protein, 57 aa, Zea Mays
MPWRRRRECLMSKTGFWGRFASELFILYRRNFVVVVWLFCEAAKPGYCYENLSSVSM

SEQ ID NO: 70427 - protein, 1557 aa, Zea Mays
MHGWRGAEGCDVRRRRLVRLMWPAARVEAEAPPPPAQGPATSPSGSSATHPRTTYRPESSAQKQECIDLPCPVSSDSFVKDGREIRVGDCALFRAVDVPPFIGLIRWIEKKEEGYPKLRVSWLYRPNDVKLNKGIQLNAAPNEIFYSFHQDEASAVSLLHPCKVAFLRKGVELPAGIASFVCWRVYDIDNKCLWWLTDRDYINEEVNRLLYRTRLEMRAALQSGGRSPKRLNSPSASQQLKTASDGTQNGGLSRGKKRERSEQGVDPAKRDRDRLLKVDDGEPGSFNLDDIKSEIAKITEKGGLPNAEAVAKLVHLMQLDRTEQKIDHSGRVILADVIAATDSPDCLGRFVQSRGLPVLDSWLQEAHKGKSGDGSSPKEADKPIDELLLALLRALAKLPINLSALQSCSIGKSVNHLRSHKNLEIQKKAKCLVENWKKRVDAEMKSNDVKPLVSGQSVSWSGKAGFQEISNVGTKRGGSSENSPKNSVPTLSSSKVLTDKPGGTDAAAKLNPGVSALSNLQHVQSTHVTTNLKEQPCKSTGGTGCPELPTVKEEKSSSSSQSPNNSQSISSEPSKDARSSTAASGGASKTSGSSSRSHRRANNGLVSGNLKEPSVGRSVSLDRSLLQDKSSQTGTASEKGIDMPSDHGNNHRLIVRFPNPGRSPARSASAGSFDDPSVTGGRASSPVVADRHDQTERRVKVKTENSRPHLASDANAESWHSNDIKGATGSEEGDKSPCAILDDDNSRTPDHSVKDAHASRAACSSYMNEKGVSETKVGTSFSPMNALIEIKYSEASHSLQAGDDTAMNLLASVAGEISKSELASSPSTSVKKLVCEGVNTGKVKVESDMGPSHPGQADAKKVAMGNEVKNDACLVPKEEQHQTAPSPELADSKAVKSSAKIEIHEGHANKCNSQHASIDSKGENRDGCTAHGKVEDGSTNKDGAMESAFGSQRSLVVSSKNSRLVLAGESSLSAADKQTQGLLKSTNHKHLLSVSDNPGAFDRHDSMAGKLDLMAAEVKKADVVGNSSVLQNDTEKKEHVSPSSADVPKLVPAASPVGVANGNNEMKESNGSSSESNSHVKSEGVNSQQSEQSAKQSSKKSSDGVCGKEDHVLSDEEGSSLAAHTKSNATAKLDFDLNEGIPGDDGHQSETTASPVVCSSAIHLTGLLPFTSPTTSGLPPAPITVAAPAKGPFVPPENLLRAKPEIGWKGSAATSAFRPAEPRKILEMPAATRDIPVSHAAGKQSRPTLGFDLNVADDQALEEDFPQSSAQTTCSESGNTRSRDGSSRSAGIELDLNRADEVADNGQFVPNASHRVEVPLFSTRSLPRVLSNAGANSSRDFDLNSGPDLYDVGTEPAPRSLPSKNTSSIQFLPQVPVRMNSDAMSNNISPWLVSTSPCGPVAIQSFLPSREQPYPLEAAPGAQRIIAPTADGGQFGGVPYFPTLSSSLVGPAGALPSQHSRQYAINLAEGSSSSVRDGNRKWESQGLDLNSGPGSIDLEGKDERMPLPVRQNLIPPLHGFVEDQGRIYQMPVVGTKRKEPDGSWDSERSTYKQLPWQ

SEQ ID NO: 70428 - protein, 150 aa, Zea Mays
MALLQPTLLTPPPLCCCSHGLLYPGFLKLPPKFSNGACCSTARASDRSELAGKSGGLAWRAAGRKGRLLGVTGAGRGPFFGGGGRRMDKGTSRVVGNLAFAAVVTYLAVTGQLRSSQYCCLYWLSVHFSSLQDKIYCRAIVRTVEKASRY

SEQ ID NO: 70429 - protein, 772 aa, Zea Mays
MEGTGDDTPGDATLSSFNCSHAQEFQFCEKLKAHLEPEAYQEFLKCLHIYNQDIITRNELKRLVKDILQHYPDLVNGFNDFLGHCENIDGFLEGTFNKRQTSRMVRPVEKERYKENEGDSDPEKERYKESKNSERVLTFNSKEGAAHEASTFPSKEKYNLCKPISELDLSNCQRCTPSYRLLPKNYPVPSASNRTDTEASVLNDRWVSVTSGSEDYSFKHMRKNQYEESLFRCEDDMFELDMLLESVTVAIERVEKLVERMEGNSLKPDSSISLDEHLTSLNMRCIERLYGDHGLDVIDVLRKNVGVTLPVILTRLKQKQEEWSRCQSDFNKVWAEVYSKNYHKSLDHRSFYFKQQDTKNLNTKALLSQIKEISEKNRKGDDVLLAIAAGNRWPLVANMSFVYLDMDIHEDLYQIIKYSCGELCNSSDQVNKVMRIWTTFLEPLLGIHHRAHGAEDADMVKSKRRTREVGLACGGKTNNAAAKGGNGSKSAGAESVAEFMGRNETIPSMKSIKHDRITSLYGVGVHPFSAYSVSHNNLRPETEEGELSPNGDFKEEHFCVFEDEAVDGTSKQNEGSTSRSPQGRPKNYLKFSGKDHSGAENEGNKRAQRSAEDSENASEADEDISGSESAGDEESSHEDQEEEEDDMDLDTKAKNDCRAEVNREAQGLDGGTSLSFSECLQSTVKPISKYVSTALPNHEKKLSHIFYGNDSFYVLFRLHQIFYERILSAKTNCSTSDNNWKASRHINSPDQYSRYYQHSGFIKDLLYMTYIF

SEQ ID NO: 70430 - protein, 63 aa, Zea Mays
MLNYPPVFTGINACSLCPGHAYCHVSLHRHRSSVSRVSPGSHQVSSRLMLMLSRIWTWLIFWF

SEQ ID NO: 70431 - protein, 137 aa, Zea Mays
MLLPIPVLHSTKDDIDFVAGFICWNALQLSYAHLHCDGNRISINRSGDWSSFCWDKLCTGPEHLISGCECHESDTQQTTNSGTPLVCRVGAKPARQQLLEQLWPVLLATMNSHMLAITWYLVRPKLDQSITSNDCHI

SEQ ID NO: 70432 - protein, 722 aa, Zea Mays
MLCRRPCPGVFLRLFATSCRRSSLHPSQPHLRTATALPTLPVAKKVPFNVSAHGRSWSDPYHWMRDTSDPDLAVLLAAENAYADAFVGSAGGGGLRAHLAAEMRARLPASTATPPQLWGPWLYYQYVPEGKEYPVLSRKLRPSSGLVGTLLDYLSGSEKEQVLLDWNEVAEKNGYVHIGSCRISPDHRFLAYTVDTSGGELFSLEVKDLLSEHVIFSSPDKGVVSLAWSGNNESLFYTVCDETLRPNQVFCKKLQSDEAGFLVFTEKDVNCCVDITSTKDFKYMTVNSNTRTSSEVFVIESDNLREGLWPIRKRVDKVQYFLEHHNGFFYILTNAPVNDTETTTEGYYLARCRAEKSLVDRWQIVTVPDSDCTIQDMDIFHDNLVLFLRKNGTPLFCSISMPIDVDVQEPKELDDLNPWFFPIPSELCSIVAGSNNDFMSSTYQLVISSPVIPDLTVDYDLRKKTFTILHQEEVTTISANLGGLGFQSNVSSIQQNMQLVKTSQNWSDLSKLFSCERVEVISHDGVSIPLVILYSWGAHCHGESPGILYGYGAYGEDLDKSWCSERLSLLSRGWVLAFADVRGGGDLSWHMAGTKANKMHSIQDFAACGRHLIKQGFVHQNRLCAIGCSAGGLLVGAVINMLPDLFSAAVLKVPFLDICNTMLDPTLPLTVLDYEEFGDPNSPDEFEAISSYSPYDNLAPDVCYPPVLVTASFNDTRSLGSC

SEQ ID NO: 70433 - protein, 219 aa, Zea Mays
MASRKLLVGLTARRQLQSRTQQLFWATSLPEATTSRSLMVAAAMARLSDRSSAPFILSSRAISSTQPVMQSTGDVSGSSPSAVDHKLAMQEDEFHKLADETIHDLLEKLEEYGDSIQMDGFDIEYGNQVLTLRLGDLGTYVINKQTPNKQIWLSSPVSGPSRFDWDATANGWIYKRTGVNLVRLLEKEIGRLLSSSPGAHHPGAGQARAWPRSASSSRW

SEQ ID NO: 70434 - protein, 674 aa, Zea Mays
MDHGGEDRVVAASLAAARRTLRAGLDKSRALGHALARAGPRLKEIQAALPVLEAAVRPIRAPRAELAAAGPHIDRAVGPAAAVLKVFDAVHGLEPPLLAPGAAGSGAAGDLPGYLAVLAQLEEAHRFLADNCGLAAQWLADIVEYLGDRFLVDPRFLADIEVTLDELKAPPTGDLDGGLLAAALGILEAEFRRLLADHSAPLAMPQPGAAAGSTAPSRVPAAAVHKLTLILDRLVANGRQDRCVAVYIDARGGVVSASLRALGLDYLREPSQDAQALGPALELWGRHLEFVVRRLLESERQLCAKVFGLHKDVASACFAEVAAQAGVLEFLRLFGGKACAEIQSQTRDLVKLLIDGAVEIFEELIVQVELQRHMPPPVDGGVPRLVTFVVEYCNRLLGEQYRPMLGQVLTIHRSWRKEVFNDRMLVDVVLNIVKALEANFDVWSKAYDNATLSYLFMMNTHWHFFRHLKATKLGEILGDVWLREHEQYKDYYLSMFIRESWGALSPLLNREGLILFSKGQATARDLVKQRLKTFNSSFDEMHCRQSSWVIPDKDLRERTCNLVVQTIVPAYRSYLQNYGPLVEQDGNTSKYVRYTVDGLEKMLSALYMPRPRRAGSFQIKHSSGWMEGTKELEIMDTATLHYWAFAFRAIEASEIRLENFVCLFPIALRYLGAI

SEQ ID NO: 70435 - protein, 197 aa, Zea Mays
MGNKPPELYYDILHVARDASPQRVRAAYRSLVRQWHPDKHPPESRPAAEARFKAITEAYEALLGQQGNMSAAPAVAARDGERSSPADKDRADSAAVSARPRAARSGKAGGAPCTPEREEPAFKTVVYSASSSVGGGRGRRALAEFSSYVVRKAPPLERRVECTLEELCSGCHKEVRYTRDVVTKNGWCVMLAASACM

SEQ ID NO: 70436 - protein, 254 aa, Zea Mays
MAGWRVERSGGFAFVYMEDERDAEDAISRLDGIDFGRKGRRIRVEWTKEDRTVGRKSSSRRSPTNTKPTKTLFVINFDPINTRIRDLERHFDKYGRVANVRIKKNFAFIQFEIQEDATRALEGTNGSHFMDRVISVEYALRDDDEKGERGNGYSPDRRGRERSPGRRRSPSPYGRGRERGSPDYGRSKERGSPDYGRGGRSPDNGRGVSPAGGGRGDHARGGGRSPDYDRQRREASPPGYDRSPSRSPGREARE

SEQ ID NO: 70437 - protein, 728 aa, Zea Mays
MNIRHHNIVLFVGYCAETQEVVVRQEGKHIFAEKRERLLCFEYLHNGSLHKHLTAEPCGLPWHICYQIIKGICLGLHYLHDKNIIHLDLKPDNILLDDDMVPKITDFGLSRLLGNGKSHTITQTRIGTWGYMAPEYLDDGVITMKTDIYSLGVIIRHMVKGRNSADTTDEEVLANWLIRLEKDPSQMMRQQTTRLLFETEYKEQIKACMDISWRCTLRKPMDRPTTQHILLTLEETEAKIKSVVGPTPPNAGQLQIAKFGPWGGDGGKTRDIRMTPCHLHSVTISSGTIIDSIGFSFTDHYGQHHTTGPWGGKEGTNKIELGPSEFLTGVSGTSGPFKNLTNVVTSLTFVTNTRSYGPFGKGRGTPFHIQTQNNGRIVGFFGRSGQYLYAIGDLSGQQRSRGGGPSGECGDSDDEPNGDFAKFGPWGGDGGQPQDIGTLPCRLDRIKISSGLIIDSIEFSYAGPDSQYRTAGPWGGHGGDNSSFQLAGSEFLTGVSGSIGTFNGHANVITSLTFVTNARSYGPFGRGRGTSFHIPVQGNGCIVGFFGRSGRYLNAIGVYTAPKPEPKAGGDEAVVARIGPWGGVGNALHDIAERPHRLHRVTIFSGTIVNSLEYLYSDGDGQQHTTGPWGGCGGTGRKIHLAPEEFIVEVTGTFHPCAWDRTIPSVVSSLTLVTSTGKTHGPFGTQLGAAFQVPVQSDSRIVGFFAHGDNYIEAIGAYVKKLTESSNR

SEQ ID NO: 70438 - protein, 72 aa, Zea Mays
MAFTMRAVKVPPNSASLEEARHRVFDFFKQACRSIPTVMEIYNLDDVVTPSQLRSTIAKEIRKNQNVTNPKV

SEQ ID NO: 70439 - protein, 349 aa, Zea Mays
MHPSCSPLAVPPGFRFHPTDEELLYYYLRKKVAYEPIDLDVIREVDLNKLEPWDLKDRCRIGTAEPQDEWYFFSHKDRKYPTGTRTNRATTAGFWKATGRDKAIFLGNAGRRIGLRKTLVFYTGRAPHGKKTDWIMHEYRLNDDNVEVPPITEDGWVVCRVFKKKSIQRGFDQLGTASAGDDDELQSFHSPGGVMTTLAEQKHGLLHQLTHGGVVVPAFDPCMNLPHLTSAEGQLAATAAFTSGTSAVAMNLLDMGRCSRHNHNHNMLKMTTTPCGSASDMPLNSGERFGAAADWSILDKLLASHQNLDQLFHCKFGGTTFAVPHHYQQEMQQQHMEISASSLHRLPLH

SEQ ID NO: 70440 - protein, 1237 aa, Zea Mays
MKPSPHFPEIGKKPKDLIAKDHTFNIAAYISSGADVIAAALRKHVEEEARDLSGEAFLRFMDQLYEQISSLLQSNDVNENLLALRAIDALIDMPFGEGASKVSKFASFLRNVFEVKRDPEILVPASEVLGHLAKAGGAMTADEVERQIKTALGWLTGERVEYRRFAAVLILKEMAENASTVFNVHVPEFVDAIWVALRDPKQAVREKAVEALRACLHVIEKRETRWRVQWYYRMCEAAQVGLGRNASVHSIHGSLLAVGELLRNTGEFMMSRYREVADIVLDYLKHRDQLVRRSITSLLPRIAHFLRDRFVTNYLKICMDHILFVLRTPDERASGFVALGEMAGALGVELVPYLPAITSHLQDAIAPRRGRPSLEAISCVGSFAKAMGPAMEPHIRSGLLDAMFFAGLSDKLIDALESISTSIPSLLPTIQERLLDCISQALPKSSIRPGASVGRASRSNNLQQFVDSNSPVLVQLALWTLANFNFKGHELLEFARESVILYLEDEDSSTRKAASLCCCKLVAHSLSASSASQFGSNRTNRIGGAKRRRLVEEIVEKLLMAAVADADVGVRSSVFKALYRNPAFDDFLAQADILTSIFVALNDEEYDVRELAISVAGRLSEKNPAYVLPALRRYLIQLLTYLDQSMDSKCREESARLLGCLIRSCARLILPYIAPVHKALVTRLCEGTGPNANNALAAGVLATVGELAKVGGFAMRQYLPELMPVVVDSLLDGGAVSKREVAVSTLGQIIQSTGYVIAPYNEYPPLLGLLLKLLNGELEWSTRLEVLKVLGIMGALDPHAHKRNQHNLPGQHREVLRPTIETAQHIVSMEELPTDYWPSFSASEDYYSTVAISSLMRILRDPSLSSYHQMVVGSLIFIFKSMGLGCVPYLPKVLPDLFRAVRMCEDGALKEFITWKLGTLISIVRQHIRKYLQDILSLISELWTSSFSLAAPNRTIQGPQGSPVLHLVEQLCLALNDEFRMYLLHILPSCIQVLGDAERCNDYYYVPDILHTLEVFGGNLDEHMHLVAPVLVRLFKVELVDIRRRAIVTLTNLIPKVQVGTHVSALVHHLKLVLDGNNDDLRKDAAEALCCLAHALGEDFTIFIPSIRKILVKHHLRYRKWDEIENRLLRRELLITENLSVQKYTQCPPDVIRDPLDDCDGTPSEIADDTQRQARSHQVNDVRLRSAGEASQRSTREDWAEWMRHFSIALLKESPSPALRTCARLAQLQVLQVAGPK

SEQ ID NO: 70441 - protein, 205 aa, Zea Mays
MLHGVLFRANFDRYLKLSALCTLSLFSRYGVRGFPAILLVNETTMVRYRGSKDLNSLVDFYKETTGLDPVAYIDVVVQQESTASLSSVAPWDRSPLEMAKDEPPYLLVAVLFIILKAAARLVPAAMSHLRAFLAVRVQNLNLGIRRGSSQVLERALNALDVRRLCSKLGLSNRATDLRKGASNARAWASSFASVSLGEPSSSRQA

SEQ ID NO: 70442 - protein, 84 aa, Zea Mays
MRQEYQEMRQERQEMQQEMRQERLERQQQPPLPPPPPPAPPRDKHREFMSHKPPTFSSSLDPLHVDDWLKLVEKMLNIAQCTDR

SEQ ID NO: 70443 - protein, 50 aa, Zea Mays
MPKKHHYSVVHKTMRQLNPMVMTGRNLPIYFKEEQELFRLDTIPIAILFN

SEQ ID NO: 70444 - protein, 220 aa, Zea Mays
MHASGTNSFGVIVGGSSLEQRKLCATEVSKRNVSGFWIAGFGFGESIEERCTLLNATTDCLPREKPRLVSRLGLPEEVLEGVAAGIDLFDSTYIYQLTMGGFALIFPVDMVEREMQNGVLNTTDGDSTKINLRATTYRKDTSRLVDSCNCFTCQNHTRAYLNHLLNVHEMLAQILLEIHNTHHYLRFFHSIREAIKVGEFDLFRQEFVKKRRTHFAAVVV

SEQ ID NO: 70445 - protein, 63 aa, Zea Mays
MSSSSSIPPPPVSAQRSTSTTHLVVYIFVLWSSSIEKNPHRQVVYLLQAGVCDRVRQPGRHDN

SEQ ID NO: 70446 - protein, 444 aa, Zea Mays
MSIAAVSADGLLALADEAERRYDFSAAAACLESALRPPYAAALLPLTEARARLRLASLLLAPRGSSRVPRAGAPAAAKTHLERALLILSPLPSAPPRLKLLAHSHLAGAYAVLGAIASQKHVLHRGLGLLDSASASGLLQREPALLWTCNFQAQLGSVFTNDGDAASALSALSVGASAAAELGSPQLELFFAASELHVHLLCWEDSAAVENAVTRASLLWDALTAEQMEHWVGLFFYTQLLQTFYLLRICDYKAASQHVERLDTAVKSEMQRGRQITALANDLSTLERTLGQSGLKEREMLALSHKQRQLKGQLRALCGYDSLNDVLDYGDKLLLAPPLMHGEWLPRTAVFVLVDLMVVMVGRPKGIFKECGKRINSGLRLIHDELVKLGIVDGVMEADLEHSTIWTAGLYLILLLQFLENKVAVELTRSEFVEAQEGLVEKSK

SEQ ID NO: 70447 - protein, 428 aa, Zea Mays
MAGLLIAVWVRINLKQFIGDIENAAVPCGLGRAIGNKGAVGLRMRIHGRNICFVNCHFSAHMEAVSRRNEDFDHVFRSMTFSSPSNGLLTTSVSGSAAQLLRGTNGSRLPELSDTDLIVFLGDFNYRLYNISFDEAMGLVSRRCFDWLRENDQLRAEMKSGRVFQGLREGEFKFPPTYKFEKHIAGLSGYDNSEKRRIPAWCDRVLYRDSRTSSQIECSLECPVVCSISLYDSCMEATDSDHKPVKCVFNLDIAHVDKQTMRQKYGEIMGSNKEVLDSLQGLEALPEVDISTNDIILQDQNPFVVKLHNRSTKELACFEIIGQTPKSSGTPFSGFPSWLKVSPAVGIISPRQSVEVTLQHGQIRSQDYLTGTSGDSSGAAQEKVATLLVTVTRVDSTAGRRHKIQVQHRCRRETYSSRGYNLADRFFA

SEQ ID NO: 70448 - protein, 479 aa, Zea Mays
MSTTEPLLSAGAEKKKGGKGPRVGIDEALHTMVIIFADREPATVPVPCAAAGREWAGGGGSGAAASTVVEWGLVCGQRYKVGLAQAVFFAGCMIGAGVFGHLSDSFLGRKGALQVVCVLNAAFGLLTALSPNYWAYAALRLLTGFSAGSVGVLAFVLATEPVGPARRGAAGMSTFYFFSGGIAALAAVAALFQGSWRALYAVTSLPSLVFAVAVVPFFVSESPRWYLVRRRPDDALRVIRAIAATNGRAVPEDLRLKLDDEEPGNKDVGGSTAHAASSGSIVDVFRSPTTRVRLVLSVLINLLSSVVYYGLSLNVVNLKTNLYVTVVVNSLAEMPAYLLTALLLDHFGRKPLAIGTMLLSGVFCTAGSLVPGAGIMRVACGVVGIFGMAATYNLLFIYTAELFPTVVRNAALGCTAQAAQMGAIVAPLVVMLGERLPFAVFGASGIVGGLLVLYLPETMNKPLYDTMAGLEEGEKNVVK

SEQ ID NO: 70449 - protein, 162 aa, Zea Mays
MGDWIIGALINIVGSVGINFGTNLLKLGHDQSLLAALGSIQFVSNIAFAYFVLNKTISVKVMVATTFIVFGNIFLVSFGNHQSPVYTPEQLIAKYSNLVFVLYCMSLVFVVAFNHYLYRSGETIISNSSKNAGTYWRTMLPFSYAVVSGAIGSCSVLFAKSL

SEQ ID NO: 70450 - protein, 1017 aa, Zea Mays
MATTEARRLAVVPQLDIEQILKEAQHRWLRPAEICEILKNYRNFRIAPEPPNRPPSGSLFLFDRKVLRYFRKDGHNWRKKNDQKTVKEAHERLKSGSIDVLHCYYAHGEENINFQRRTYWMLEEDYMHIVLVHYLETKGGKSSRARGNNIIQEAAVGSPSQIMEVESSLSGQASEYEEAESDIYSGGAGYDSFTWMQQHENGTGPVIDSSLFSSYTPASSIGNYQGQHATQNKSFYPVNQHNGPLILNGSSDMLGTNGRANQTDLPSWNSVIELDEPGQMPHLQFPVPSDQGATTEGLGVDYLTFDEVYSDGLSLNDIGAAGTHGKSYLQFSSATGDLSATENSLPQQNDGSLEEAAIGYPFLKTQSSNLSDILKDSFKKTDSFTRWMSKELPEVEDSQIHSSSGGFWSTGEANDIIEASSHEPLDQFTVSPMLSQEQLFSIVDFAPNWTYVGSKTKILVAGNILNDSQITERCKWSCMFGEVEVPAKILADGTLICYSPQHKLGRVPFYITCSNRLACSEVREFEFRPTVSQYMDAPSPHGETNKVYFQIRLDKLLSLEPDEYQATVSNPSLEMIDLSKKISSLMASNDEWSNLLKLAVDNEPSTADHHDQFVEKLIKEKLHVWLLNKVGMGGKGPSVLDDEGQGVLHLAAALGYDWAIRPTLAAGVNINFRDVHGWTALHWAAICGRERTVVALIALGAAPGALTDPTPDFPGSTPADIASANGQKGISGFLAESSLTSHLQALNLKEANMAQISGLPGIGDVTERDSLHPPSGDSLGPVRNAAQAAARIYQVFRVQSFQRKQAAQSEDDKGGMSDERALSLLSVKPPKSGQLDPLHSAATRIQNKFRGWKGRKEFLLIRQRIVKIQAHVRGQQVRKHYRKIVWSVGIVEKVILRWRRRGAGLRGFRSTEGSVESSNGGTSSSSIQDKPSGDDYDFLQEGRKQTEERLQKALARVKSMAQYPEARDQYHRILTVVSKMQESQAMEEKMLEESAGMDFMSEFKELWDDDTPIPGYI

SEQ ID NO: 70451 - protein, 360 aa, Zea Mays
MMELAALKKLMPARPNPVKLKETLCEAKLSLSNSPDSVLNQSNLLISSSSPDIGEPSDKVQVDSCQYLISSHMGDCRVSGPDSSSLNTCANRNVSCKAHDEESLDQALIIKHDSGMMPSSNQTSLYATVGTEGSAELKQDVSHCNDFNIRVNDESLNQVLRNQHGDAIPLPDVVSLDAKVDKERSWCVEPLIANSDCCTDSVNVDSLCTDQRLADAPSGPTADAPSMLAEEESYPFSAKLENIDVARIKGLLMKRKSRREIQDRAIASDGLSEEDWIERELESGIVTNQEANCAAISDELSDEAWIERELESGIVVGPRNEQAITFDGLSEDDWIERELESGIIVEPAPATKKRKLESSC

SEQ ID NO: 70452 - protein, 314 aa, Zea Mays
MQLRMSCPYTSSQNGKDERMIRTTNDTIRTLLLEAHLPARFWTEALHTSTYLLNRLPSTACPAPTPHQALFGIPPRYDHLRVFGCACYPNTAATAPHKLAPCSTLCVFLRYSPDHKGYRCFDLCSRRVLISRHVLFDESVFPYSTTTPPSSDPYLDVFTLFPTDAVVEPPILPLSAGTRSPPVGPTLGPVPCSGPAVSPTVVLPLRGAPSPTAPRPSEGGGTAPPTGPSVPTPPARFAQPVQVYQRRLSPSGFASPPPPSPPLPLSPSVPSPPATLPVAQSPPGTPTPLPWPVSRRRCTTHRSFTTTHDTSTRW

SEQ ID NO: 70453 - protein, 370 aa, Zea Mays
MAGGGAAYQSSSASPDWLNKGDNAWQMTSATLVGLQSMPGLVILYGSIVKKKWAINSAFMALYAFAAVWLCWVVWAYNMSFGDRLLPFWGKARPALGQRFLVAQSQLTATAVRYRDGSLEAEMLHPFYPAATMVYFQCVFASITVIILAGSLLGRMDIKAWMAFVPLWITFSYTVSAFSLWGGGFLFQWGVIDYSGGYVIHLSSGIAGLTAAYWVGPRSASDRERFPPNNILLVLAGAGLLWLGWTGFNGGDPYSANIDSSMAVLNTHICASTSLLMWTLLDVFFFGKPSVIGAVQGMITGLVCITPGAVERKQTKENKVSKEESKRLQLLHSGLLGSSYSRLNRLFKAWCKGGQPLSWEFSQVASPGTL

SEQ ID NO: 70454 - protein, 76 aa, Zea Mays
MFFFSRRLWRSGLGAGLCTLEKVRRKGKNAAQHIGSWLTRSRHALRGSRRTSAMAGITLRRSRSSIEATDKWVRPA

SEQ ID NO: 70455 - protein, 95 aa, Zea Mays
MSHYKFKHSRHGSLSFLPRKRSSHHRDKETHKLRVRRSYSSGSMGKKICSTDGTSTPTRSMNQVISLREETSGRTHVEYAIFNIPFLAVTFVFLF

SEQ ID NO: 70456 - protein, 299 aa, Zea Mays
MKACAKAAGERLSLVCAPSTRQPLARRSPCHLGPRPLDALPLLLLWDTWACFVKARRLPSQHETKSQVSCSVRVSENTAHRIDATAENIFPAVKDHVLKATDAINRGEVIAVPTDTIYGFACDACSAGAVNRIYEIKGRIQTRPLAICVGDVSDISRFALVDHLPHGLLDSLLPGPVTIVLKRGENSILERSLNPGLDSIGVRVPDLDFIRSIARGTGSALALTSANLSGQPSSVCVKDFEGLWPHCSYVFDGGVLPSGRAGSTIVDLITPGVYKILRDGSSRKETAAVLGKFGFVEAL

SEQ ID NO: 70457 - protein, 640 aa, Zea Mays
MFLMPGLIITLYVTGALNTVLSLEHQKEIRRYLYNHQNEDGGWGLHIEGPSTMFGSALTYVILRLLGEGPDSGDGAMEKGRNWILDHGGATYITSWGKFWLSVLGVFEWSGNNPVPPEVWLLPYLLPFHPGRMWCHCRMVYLPMCYIYGKRFVGRITPLLLELRKELFKDPYSKIDWDKARNLCAKEDLYYPHPFVQDVLWATLHKFVEPVMMHWPGSKLREKALETVMQHVHYEDENTRYICIGPVNKVLNMLACWIEDPNSEAFKLHIPRVYDYLWLAEDGMKMQGYNGSQLWDTAFTVQAIVATNLIEEFGPTLKLAHNYIKNSQVLDDCPGDLNDWYRHTSKGAWPFSTADHGWPISDCTAEGLKASLLLSRISPKIVGEPMEANRFYDAVSCLMSYMNDNGGFATYELTRSYPWLELINPAETFGDIVIDYPYVECTSAAIQALTSFKKLYPGHRRKEVDNCISKASNFIESIQKSDGSWYGSWAVCFTYGTWFGVKGLIAAGRTFENSPAIRKACDFLLSKELPSGGWGESYLSSQDQVYTNLKGNRPHAVNTSWAMLALIDAGQAERDPTPLHRAAKVLINLQSEDGEFPQQEIIGVFNKNCMISYSQYRNIFPIWALGEYRCRVLGAGKPWR

SEQ ID NO: 70458 - protein, 377 aa, Zea Mays
MTRGTEVVVRALLVAAAVAGLLLSAAAEDGVVIQRRSLHQPFFPVDPTPPPGFDDSIVPPPPPPAAAAGAAAASAASKGGGRSVTNAVAIALATGLVVLAVAFYSCFLLWRRRSDGGGGGVGGDGLRAVKSSRPGAVAVRVASDVGSSARHQRSPPPSSTASDAIYLDPLTTMVEVSRHRPQSPDLRPLALVKQPSPDLRPLPPLKRPAPQPPPPPASTPPMTTTTGDSSDEEDQATYYTAPKTAKSSFSRSTSQRSTVEPTVAQPPAPAPASTPTPLPPQANAPRPGRPPPPPPPPRQRLLRPMPEESPPPAVLASLALTNPPEPSGQDRGGENPDGHGGRARPPKPPSLKPLHWDKLRAISGRTTVWDQRRRGGN

SEQ ID NO: 70459 - protein, 227 aa, Zea Mays
MGMVASMCTEPIKRHRVERDLDGKVADALRERTRSRQRTFRSVNSITMRLPRFKEGLRDVKNIFDQYDEDSDGTIDSEELQSFGSRVRVHMSEEEMSNLHRYCDIDSRKGVQFQEFVVLLCLAYLLFGPDVTRRVRFGVRVRQAQLRLRRAHRRVHLLRQGRGRHAAEERRHPQDERGVAPGEDTQPHNSTAIQGDGSEQEREGEPQGVPLLHDQMGWSRDRRRWQR

SEQ ID NO: 70460 - protein, 174 aa, Zea Mays
MLLSKLPPQAQRLHGGGGECCHIPRHVHHRLCRARRHTLLLLCILRFSPLSMVCEHLVWLTRKCQMVQKRVTKDHDSSLASCHFVPPRHDSAGPLNLDVNDKMITGLPYLFLCTLSDQLGIGKETTRRLGMSTKCTLPLPYSEQNKDESLASLPIDELTEKADGLSGVFLGMRS

SEQ ID NO: 70461 - protein, 381 aa, Zea Mays
MGSTCLLGHRMVQHRGAVGVHHERGLLAGAADPGDHPAEHRWGQRRRLPRLQWLSWFGQLGALWNVAGVFVLVILVPSVAKERASAEFVFTHLNTDNGMGIHSKAYILAVGLLMSQYSSIGYDTSAHMTEETKKADWSGPMGIVYSVALSSVFGWVYLLALTSVVTDIPYLLDTGNDAGGYAIAQALYDTFRRRYGTGAGGIACLVIIAVAVFLCGTACVTSNSRMGYAFSRDGAMPFSHLWYRVNKQEVPFNVVWLSVSVAFVMALTSLGSQVAFQAMVSIATLGLYIAYALPIFFRVTTARKSFVPGPFHLGRCGIAVGSVAVLWVALVTVLFCLPVAYPVAKDTFNYTPVAVGGVLVLSLVAWVLHARFWFRGPITNV

SEQ ID NO: 70462 - protein, 680 aa, Zea Mays
MANHELVLGHGQDAELALGPNHHDFGQDHGLGLGHSHDLGLGGHAHDHELVLGQSHEHDHQLVLGHHHDDDHQLVLGHDDHHHHHVHHAGELVLRQGHDGDSETLEVQGHHHDELDLSESHELTLAETHHLGVDQNFDQLSLEQAHELALQPHDLSQAPLAVAPVVQSRTMVVSPEFQLAVGQQFPDVVSCRRAIRNTAIACHFEIQTVKSDKSRFTAKCAAESCPWRIHAAKLPGVPTFSIRTIHDNHSCVGINHLGHQQASVQWVANTVEERLRENPEYKPKEILEEIHKAHGITLSYKQAWRGKERIMAAVRGSFEEGYRLLPEYCRQVERTNPGSIARVYGNPDDNCFRRLFISFSASIFGFVNACRPLIGLDRTLLKNKYLGTLFLATGFDGDGALFPLAFGVVDEETDENWVWFLSELHELLEKNTENMPRLTILSDRRKGITDGVEFNFPTAFHGYCMRHVSEAFKKEFNNPVLANLLWEAAHALTVIEFETKLLEIEDASPEAVVWIRHLPSRLWATAYFEGTRYGHLTANIAESLNSWILDASGLPIVQMMECIRRQLMTWFNERREASMQWNTILVPAAERRVQEAIERARGYQVARANEAEFEVISAHEGTNVVDIRNRCCLCRGWQLYGVPSASPWQHTARLIRRPYTQSLTGPSGMKQQIKARSRWR

SEQ ID NO: 70463 - protein, 1015 aa, Zea Mays
MADGQHIQAASEEVDSIHFSFYSDDEIKRISIKKITKSERLDAKNLPVPGGLLDPAMGPINDIDICKSCGQHSVRCPGHFGHIELAKPLFNPLLFMSLKNLLHVTCFHCHKFRLNKEQVDRYVNELELLVKGDIVCAKNLEDSVEEAYLSKEDENMNKTTSGDNSSSVKDKKTWTSIQLKEVLSIFSKIMKKRQKKCAKCDMKSPTISSPIFGWLVKDTKASAVRTNAIADFKLKGDGDIHNSGETGVSGLEEESSSPGMVSKDSINEVRGLSDDTIKELVASSGKKHLLPTEVESILKDLWKNEARFCMLLCDFQKNMSSEPEKRRGYEMFFLSSLLVAPNRFRPSTSSSLGIMEHPQSVLLSKVQESNLALQHNNASSNHMDVLQRWMDLQRSVNVLYDSSKGLARSEKNAHGIRQLLEKKEGILRQKMMGKRVNYACRSVISPDPYLAVNEIGIPPVFATRLTYPEKVTPWNTKRLQEAIRNGADIHPGATHYRDNNSMYKLQAVPAKRRSIAKMLPASRGSICQPGRDPNCEFESKVVYRHLQDGDIVLVNRQPTLHKPSMMAHFVRVLPGEKTLRMHYANCSTYNADFDGDEMNVHVPQDEISRAEAMNIVDANKQYIGPRSGDAVRGLIQDHIVGAVLLTKPDTLLSREEYSQLVFGSCVPSSNCGSHHPAKVSAIEDYDTLELVHPAIWKPRPLWTGKQVITTILNHLTKGCPPFTVEQKGKIPKEYLKEDPSAQKEKEDPSARKEAHSAKKGKREDPSAQKEKDSSVNKEKQEKIQKQKQKDRSELVLYIHNNELIKGIIDKAQFGKYGIVHTVHELYGAYTAGILLSTFSRLFTLFLQDKLRSKILSGSEVRSNEVHWKFTGADEDHKGDLVKLHMEVEKAVRSNGESDTATLDNDMKNALNGITTDVNKILFPDGLQKPFPGNCLSLMTTTGAKGGPVNMNQISSLLGQQELEGKRVPRMVSGKTLPCFPPWDISSRAGGFISDRFLTGLRPQEYYFHCMAGREG

SEQ ID NO: 70464 - protein, 745 aa, Zea Mays
MAAEDKGTGDRENADPNLCSIADASLSHENTEDKSDLDTKSAPSIQLLQPKPGENKEPGSHDIHFNSANTTGNSEEGNNTGKKRDVFRPSVFDRISGHRDQWCNEDTRLNSDSHRNQWREMEKEHSDMNKVEQHCDDPKQYLGSQRSRKERWVSNERNYDQHHENNWNSRWGASSKDSQNWREKSTDSDIKDDYSCEKVFSYSTCHGKEKDGTNHEKVNERDSNISRSWNSSYFANRGAGGTSDHLFTDPQKLSASFGYSSYRQESDSPNSTSSRRRFTSVTSRVNSRSSRPFHLGVLSERPVGPSSNSVRYSRIKLFEIYRTTDVRNFTMPINDIGNNEISSLWQEDPMDPLALIAPNAEEAVILKGIEKGDITNSLAQACKDGSDDKNIPGVAALEQMKLSGREDQTGNNEEFNGKMTIDIRGILGAADLREHLKSDKSPPKESESGGGGIHGPCAEFGHQRNALDQGTKVGDGENVNPENLSLYYKDPKGCIQGPFPGYDIIGWFEAGYFGIDLLVRVASAPCDSPFLLLGDVMPHLRAKVRVPPGFSNTKPRSMTDASHLGSVYLGTSDYGSINKNGCVTEAENYFLEAPVSSKIQNPRAATNVVTGGMNEWRFVSGEKVNSINHLEVQKVQLETENTFQIEGDVISVGESQKKESVQSTSHSTFFPQMVDPSSEALQPQNINLLSMLLPAEKGQAPTATSGLSLRSNNADSGNLHAESTNFSLFELSNHTARKVSRWNIS

SEQ ID NO: 70465 - protein, 252 aa, Zea Mays
MAGQPPPSGASEDDFLEHFFAFPSAASAGAAGGHAGAGVGGDHPFPLALSLDAAAEAKPMFQAQPKPGEGGMAPQPPAPRPKVRARRGQATDPHSIAERLRRERIAERMRALQELVPNTNKTDRAAMLDEILDYVKFLRLQVKVLSMSRLGGAGAVAQLVADIPLSVKGEAGDGGGAPQQQQQQHVWEKWSTDGTEKQVAKLMEEDIGAAMQFLQSKALCMMPVSLAMAIYDTQHPLDGHGHSLKPEPNASS

SEQ ID NO: 70466 - protein, 173 aa, Zea Mays
MGAMDATAGRTQGPSSLALLPSREGLTAGMTGSGVVASAGASQGAPVGRCGEGRAGAARREMEHAQGTRRRPGRGSWGRARKEQGACADDEQGLGQGRARTGGAELHGRRAPWWGGARGTPWEGSWRKRKETGRSSAGEGRAPGSSARRRPTRVAGRRGGRERSERGREKLEG

SEQ ID NO: 70467 - protein, 61 aa, Zea Mays
MRAGTARSDGGTTTTQHSPWTACARRPAHQVRTAYHTVARSKHEEPGEDRSRSKELLLYFF

SEQ ID NO: 70468 - protein, 78 aa, Zea Mays
MAGFADALKPEKLSDMHFKRWQSKVTLCLAAMNVFHISKCKPEDVLTHEEEKKYDDTNTIYMGAVLRVLVNCLLDSKL

SEQ ID NO: 70469 - protein, 459 aa, Zea Mays
MPCSSSSSNPFHSLASAFPFLSSTSPPPSPPASPAPAAPHLAVPLLLPVSSASESRRGAQPLPGTRMVGAGATGGGNMASGGGGPAFVGQVFTMLDPSGNGLMAVTTRFELPRFLTNRTPMWFKRMLSPSKKTENSPVFRFFMDLNDAVSYVKRLNVPSGMVGACRLDVAYEHFKEKPHMFQFVPNEKQVQAANKLLKSLPQRGRRKKLDGVPVFSAQNLNIAVATNDGIRWYTPYFFDKNLLDNILEASMDQHFHSIMQNRHTRRRRDIVDDSLTSEIIEESAESLLEPPEVQELMNEIGPAGIPLNVVTKAAEIQFLDVVDKVLLGNKWLRKASGIQPKFPYVVDSFEERTAVSIANIATTSSLTASNDDSSCQNNQETQSSEPSGDNSSYRNHNNEDHNHFPFSNLLPNIWPGHDRKFKSQESDNKFSRYDADVKNEQSQLKEDNGRLDKRVGANE

SEQ ID NO: 70470 - protein, 67 aa, Zea Mays
MHHHTRLLKQKKQVYVFVKRIKGRPAQKLPRRWRVVIVVGPPLRHLWRQDDTIVLDIVVVERARHGE

SEQ ID NO: 70471 - protein, 75 aa, Zea Mays
MSSMTRRRPRPKQAGRQRAGSQARRGLAWGQGQSELREEHRETSMLMAGARGQRATSAACCNFGAVAGPGSAVWP

SEQ ID NO: 70472 - protein, 938 aa, Zea Mays
MATLVRPPALHVRAVSGGGNKDRVAPQRPWWGGNKPISPRQSGGSGARGGAGGGGVALDQVLGVLRRDGEFVQAAVGAPLRDVFWLRFLEKKQRKQQQPRPKHKPFRQQQEEEEVVVVDESPPAFPPPSYPSGLSCVELMAADFQALKVYAGSARHSLARRFLGSNSKGKSEQQPKPKPQEQQKEQQHILQAPAFPPPSYPPGLSCMELMMADLEALKLYINYYSAILTTPLPQHYDPDLLAQYFASRPHILASRVIQILFTFLSAVVKMRISKRAQLTTDATYSSGNSGNGFDDTQYMVGQLLKETFLNLGPTFIKVGQSLSTRPDIIGSEICEALAELHERVPTFPREDAMKIIEGEFGCPVSHMFSYVSDEPVASASFGQVYQGRTVDGSLVAIKVQRPDLLPSVLRDIYILRLGLAFIRKIAKRRSNISLYGDELGRGFVGELDYNIEAANATKFMEVHSRYPFMLVPKVLKQLTRKRVLTMEWVAGENPKDLLSLSKGVSEKFTQASDNQKLEAKSRLLDLVNKGVEASLVQLLETGLLHADPHPGNLRYTPEGRVGFLDFGLLCMMERKHQRAMLASIVHIVNGDWASVVYDLTEMDVVPPKTNLRRVTMVLGKIWSVAFKYHFRMPPYYTLVLRSLASLEGLAVAADGTFKTFQAAYPYVVRKLLSENSLETRRLLNQAIFNKRKEFQWQKIDAFLKLASARTNFKYNSEVLPEPDMKSMNVASLVEISDAYSLDRAIATPERALHTANLCVRLLLSKESIVIRRLIMTANAKSLARDLISRDALMFRVLLSKVIADVVYQWMLSATGLKRVMETKIQTPMTTGKNEGHLVLAEEPSTLMVLQAAVKDRRIQLMFTKFVRELREEPVLMIRVSWNVFLISVSSAAVGLHRFLVFFLKEDGARFLDDKVKKMKIWLMEFSKRTANLEIQGIL

SEQ ID NO: 70473 - protein, 220 aa, Zea Mays
MEKAAHVAAGATQEQESSPNRLAVVTGGNKGVGLEVCRQLALKGVTVILTARDEKRGKDAAETLRRECQLPNIIFHQLDVRDDDSATTLARYVERRYGKLDILVNNAAISGIVADEEGLKALNIDAETWTSGRAANLLKEVFQNTNDEAFNCLNTNYYGCKRVTEALLPLLKLSTSGGARIVNASSLASELKVWSSCIPARTEKISMLLTLIILLPENAK

SEQ ID NO: 70474 - protein, 61 aa, Zea Mays
MIVLIRSPRLGGAPLAGPAREVGDNRGLGWIMDARERPASRTLRWSGPNLVVYCKQLFITD

SEQ ID NO: 70475 - protein, 224 aa, Zea Mays
MSGLCVWTFTSWITEALSTFWRPECTVGGDDGQQVTVHDPEVRDLLPLTIHHMPIVVTFAYFGEGNIVVLDPTYKEEAVMGGRMTAIVNSNGDVCAIQKAGGEGPVSSVTMQCLRIASVKAAVITSKIKKAKFKFAFLIFDILFSGNNIKIMNLGGDGQGASGVITDVLRNTDDDAVDPHLERIKNQAGDEESDEEDEDFVADKDDSGSPTDDSGDEECTDVLS

SEQ ID NO: 70476 - protein, 358 aa, Zea Mays
MEVPKAVALVAALALVALGALATRWLQRMEARNEEVRRLALLAAAEEETIAREEAYYYGQYGGFVRSSDLPEAPSLWAAQEVPPAPKEVMAEAAAAAAATVASPTAGKGVCAMCSKPTTLRCKRCKSVKYCTLKCQIDHWRNGHKDQCHPLGHGATQDDTPENVMAGVGLKDMPSGASTTYQICDDNKDMLYSQFTGKAESVDYSKLSTSSKICKVCDGTVHENSCPAHDQHVGLEPEPEQSNKQALGTENHESLRKLPCMPAVDKVPSAQSGTYCLASNQLKREDDPPGPCARPESSGLMPHNSSTEKNYARQQTTTIAARNYPTESTVFAYKKFVELYSFNKLELHPFGLCNLGNR

SEQ ID NO: 70477 - protein, 524 aa, Zea Mays
MEELLEIVLVVSTILLGLALVYLYEILWLRLEKIRKKLRRQGINGPKPTFLYGNTQEMKRIRQELKFVQRQDKDMNGYISTIFPHFLFWRKTYGPVFLYSTGVLEILHVAQPEMVKDMGHWTPSELGKPQHIMKSRKPLFGLGILAANGDLWAYEKKILAPQFFVEKIKGMIGLIVDATVPLLQSWENMLDGTGGSKEIYVDGYLRNFSADVIARACFGSNFVEGKDIFCKLRQLQKLISEQDTLVGLSAVWKYLPTKRNREIQKLDQEVRLLILDLSREDRSRSRSNNAGTHVSTYDNLLHAIVDGANQSPSYCSAPEDFIVDNCKNIYFAGYETTAVTATWCLMLLAAHPDWQDRARAEIREVCCGQTAMDIDVLRQLKILTMVIQETLRLYPPASLIMREALTGIRLGGVDVPRGTIIQVAISLLHLDMEAWGPDANEFRPDRFANGAAAACKPAHMYMPFGYGPRLCTGQNLAMAELKVVLARLLSKFSFSVSPGYQHSPVFRLTIEPESGMPLVVTRLA

SEQ ID NO: 70478 - protein, 267 aa, Zea Mays
MELFPAHPDLQLQISPPPPATKPMELGFWKRALVDTTTSPATATAVAAATTATTATSHAFASSAPTSAVGYHHAAVGAHHHQVPVPVPAGSHSHSHLGLPLLHHTHPILPAAESGGVLRRPDLGSTRPIRGIPVYSTSQQPLPFLQSHPHYCCDAIAGAGHPRSPKAALRLAGAPAKRGARAPRMRWTTSLHARFVHAVELLGGHERATPKSVLELMDVKDLTLAHVKSHLQMYRTIKTTDHRPASASSYGTYVRTRTTMINHTATP

SEQ ID NO: 70479 - protein, 85 aa, Zea Mays
MICTIDAWQKRDAPLYGPKVSTFLPFITCFPILHFNLQNHNCFLLIDLLNHQSILDLLSHPVISYINTPGHHSIPRVNLLHHCCI

SEQ ID NO: 70480 - protein, 248 aa, Zea Mays
MSVSHADEHEISLCDPSSEDDRRRRKIGSLPLKAIHALRKKRARRRVTDFRFPAAISIEDVRDAEEERAVAAFRDRLAAHRLLPDKHDDYHMMLRFLKARKFDSDKAMQMWSEMLRWRKEFGTDTILEDFEFDELNDVLHYYPQGYHGVDREGRPVYIERLGKVDPNKLMQITSVDRYIKYHVQEFERAFRERFPACTLSAKRHIDSTTTILDVHGVGFKNFSKTARELVQRMQRIDSDYYPEAVGLS

SEQ ID NO: 70481 - protein, 899 aa, Zea Mays
MDDSVPFNDLGPSKPPSASFYDDMFESYFNRAAEAPEPAPKASSSPSTPPPVFDKPVFDDDPYTADPFDAIPLFGGGGGGEEEDLHGGVRSAAKPERTELEVVGFDEDLFPGLAGSTNFPMEKPAREVERDRQPVGFDDELIPGFDGSMKPAPQMEPETVAFDDDVIPDCSGGTSYPSSAREEPITRQESESISSSKISMSMPEDPFVTLGGTHKSGYSSLGLFSNLLNNIGMPRKEADTTPDNTSGIFQGSDIFTEFPKAMPPFSFTSENQSDRTERRYTENIISTSHSDRLPQEKTVQQASTEAPANTLTEMNFPEASVVHEVPVTTSFQTLNPFVEEDDLLEVNQSSQTTNDVWLTVLDIALVTLPTSAPPPSRPPPPLAAKKPPTESVTSEAYAHHCNQRYHHSICSSNTSKTSQIDELEDFFLTKPANSAIGHPQVLKHEGNGHYPSAATASFMDWTEMGHCKRGNQGAFDSMFTSSQYRQPEIDEKAEVCAHETESTDEEKRLENEQIQREHKEEQIRAEREMEEELERERENVRQREQEEQRRREKERVARQAVDKAIREARERSAAEARMQAEKEARQRAERAAVWKAATEARERAAVEAKERAAKAAAEAKEREAAEARERAATESRERDAKVAADARERAARAAAEAREKETAEFQEKATAEARAKAERAAVEKAAAEARWRAERAAFERVATEVKQRAFNDARERAAAAAAAEALARENQQRRATTEPDLESFFGMPSRSSSLPRSYNNTTTNPFDVQPGNAGSGGVRRTPSGSGFPFTQPSSSNLMDGLSSIFGAPLPSAVFQEVDGESEERRKARLERHQRTMERAAKALAEKNERDLQAQQEQEERHRIGESLDFEIKRWAAGKEGNLRALLTTLQYISNNCEFD

SEQ ID NO: 70482 - protein, 970 aa, Zea Mays
MNSPKMELSPWLVFSLGFLAQALVILADTNAQDASGLNGIQDSWNKKPSNWRVGTDPCGDKWNGISCTTSRVTAIRLSSLGLSGSLSGDIQSLSELQTLDFSYNKDLGGPLPASIGSLSNLENLILVGCSFSGEIPKELGQLTKLRFLSLNSNKFSGSIPASLGRLSNLYWFDLADNKLSGGLPVFDGTNPGLDNLTNTKHFHFGVNQLSGTIPSQIFNSNMTLIHVLLDNNNFTGRIPPTLGLLNTLEVMRFDNNYQLTGPVPSNINNLTKLAELHLENNQLTGPLPDLTGMIALSFVDMSNNSFNASGVPSWFTTLPSLTSLYLENLRVTGQLPQALFSLPAVQTLRLRGNRFNGTLTIGSDYSTQLQLIDLRDNQISQITVGGSQYNKQLILVGNPICSPGTGSSEKYCASPGQSNQAAPPPYSTPMNCSGLPPPCLSDQLVSPGCVCAVPYRGTLFFRSPSFSDLSNGSYWGQLETGIRAKFRSLSVPVDSVALHDPSVNSVNNLQLALEVFPSGKTQFSEQDISDIGFILSNQTYKPPSVFGPYYFLGQPYSFANVVLIPSKSKANNRLPLIVGASVGGAVLVAIVLALVTIVARRKKRPKQNEERSQSFVSWDMKSTSGSSVPQLRGARTFNFDELRKITSNFSEANDIGNGGYGKVYRGTLPSGQLVAVKRCQQGSLQGSLEFRTEIELLSRVHHKNVVSLVGFCLDQAEQILVYEYVPNGTLKESLTGKSGVRLDWRRRLRVLLGAAKGIAYLHELADPPIVHRDIKSSNVLLDERLNAKVSDFGLSKPLGEDGRGQVTTQVKGTMGYLDPEYYMTQQLTDKSDVYSFGVLMLEMATARKPLERGRYIVREMKVALDRTKDLYGLHDLLDPVLGSSPSALAGLEQYVDLALRCVEEAGADRPSMGEVVGEIERVLKMAGGPGPESASNSMSYASRTPRHPYGGDSPFDHSNSGLPSARVEPK

SEQ ID NO: 70483 - protein, 172 aa, Zea Mays
MAATLVDQKSVAFMIRNGSGIISVGMEEEDLTRLMIPMMSPITEIEDITAAASTVTVDARVGISTGVSAADRAKTILTLASSDSKPSDLRRPGHIFPLKYRNGGVLKRAGHTEASVDLVALAGLRPVSVLSTVMDPRDGSMAGVTVLQQMAMEHDIPIVSIADLIRLVYPKV

SEQ ID NO: 70484 - protein, 370 aa, Zea Mays
MATAGKVIKCKAAVAWEAGKPLSIEEVEVAPPQAMEVRVKILFTSLCHTDVYFWEAKTPVFPRIFGHEAGGIIESVGEGVTDVAPGDHVLPVFTGECKECAHCKSAESNMCDLLRINTDRGVMIADGKSRFSINGKPIYHFVGTSTFSEYTVMHVGCVAKINPQAPLDKVCVLSCGISTGLGASINVAKPPKGSTVAVFGLGAVGLAAAEGARIAGASRIIGVDLNPSRFEEEFVNPKDHNKPVQEVLAEMTNGGVDRSVECTGNINAMIQAFECVHDGWGVAVLVGVPHKDAEFKTHPMNFLNERTLKGTFFGNYKPRTDLPNVVELYMKKELEVEKFITHSVPFAEINKAFDLMAKGEGIRCIIRMEN

SEQ ID NO: 70485 - protein, 92 aa, Zea Mays
MDARRFVSAIYSSKHVQPITQIVMNLPNDAVEFLAEDPEHDFHERINLTLGENIDTVEMHRVRLVAPGKWMICATFTLPQSVASAQPNYITC

SEQ ID NO: 70486 - protein, 52 aa, Zea Mays
MSMSVKQRVSDFDSSRIVQSVGVLCTKAPAQTWAPGCRPTLPDARPQWASSP

SEQ ID NO: 70487 - protein, 73 aa, Zea Mays
MLITATDKATSLSLVIVVLLFKLCCMNRFICILLFVLVFLLVKLAEVSLLHHISSRGLNTFSTVLCSSPFLNI

SEQ ID NO: 70488 - protein, 198 aa, Zea Mays
MAEPGLEGSQPVDLSKHPSGIVPTLHGIFLKCVGSSVPLNRGMKPFLAAISVSPGASAFKRRGTWGSFELKESGGNEMDGEYARHWMSADVKSRVSSSVGRSGSDDLFRPYEISGWAGYASLVAAILKLHETVRMDWPNSWAAVVPSSSVMLRDCGTMLKIRLCSHEEGNKDRCRDNGWWCHGGINTPAGFIPPNPSN

SEQ ID NO: 70489 - protein, 414 aa, Zea Mays
MCCYLTRTTKETHQIVIDNLDETPTYGGWVEAKGPRYCPSIEDKIVRFKDKESHQIFLEPEGRNVPELYLQGFSTGLPERLQLSLVRTIPGLENCLMLRPAYAVEYDYLPAYQCSRSLMTKKIEGLFFSGQINGTTGYEEAAAQGIISGINAARHSDGKSLIILERESSYIGTLIDDLVTKDLREPYRMLTSRSEHRLLLRSDNADSRLTPLGREIGLIDDRRWELYQSKQARIKQEKERLRSTKVPGGEFAAEVTAVSNQPVKDSSTLEAILKKPHVQYKLLDEHGCGNENLSRIEKECVEIDIKYEGFIARQQSQLHQIVNQEHRKLPEDLDYHSMTNLSLEAREKLSKVRPQTIGQASRIGGVSPADMTVLLIWMESNRRMATHRRQREQLGSVAVESDGSSEEAVQASTA

SEQ ID NO: 70490 - protein, 294 aa, Zea Mays
MAAARYDVEKGGRNNGDGKPSPPPPGHLYPQRDGEREWVPWLVPLVVAVNIVLFAVAMLQKLGALVWDKVVREHQGWRLVTCIWLHAGVAHLLANMISLVLIGLRLEQQFGYVRVGIIYLVSGVGGSVLSSLFIRNNISVGASGALFGLLGAMLSELFTNWTIYANKAAALVTLLVVIAINLAIGILPHVDNFAHIGGFLTGFLLGFVLLMRPHYGWMQRYALPSDVKYTTKKYLAYQWALLAVASVLAVIGFAVGLGMLFRGVNANDHCGWCHYLSCVPTSRWSCGNSQSYCT

SEQ ID NO: 70491 - protein, 366 aa, Zea Mays
MEELSNKALAPSLLSLCLDAVADRLISDNAAAGGGVGRTGSSGGCSGGGGLAGFSEDDGGEADEDRLHPQELAEGLPWELLHRLASRLPPVVLESLHHAAHARYCSAETTSGLGVQDGERRGVKRSRCEDFNSTWQLLFKLRWPLGGNTGHNNLVTVDWQQKYWEKHLQECLNEAAEHAFLPFFCGSIGELSISAKIMNSIYQSMGTSQQHSRLAYQCSKFGCYVRSLRLQGVLCTAETYVLLQQCKLERLMFIRIISDLEVNGACLLLSWHAETLLSLEFIHCQLYPTVMDKICMSVYLKGSQSHGIQQFSIKSSQICETKPLTISSGLFKILSSDCWLAFGIEQMFYKLISAEIRYFYELPVCS

SEQ ID NO: 70492 - protein, 455 aa, Zea Mays
MEGSGHARILPTEYMVILLDEEQDEDALLLAAQFCNYSFSSLILEESRNNVPYSFYARIEKIESLEPFRCAERMQIILEDNDNAKMKLVLWGEQTSLANLCSVGSMLALDRPFIANFIDNNHEDSQELCLEYGSATQVYMVPIAQQEEQVPFTPTQVKSQGPRLSCVLTDNVASQVTLPRDLYGSVDFSKYPFRAYVSDLHDKMVGISLFGTVTSVCKVSTSGTTFYLELEDTTGVVLMKLIFVGPWSLGRVGVGHMVYISGLTCALSSTNILEVSWREKEPGSLFVNLSLLPALLNSSCLHNLSPLSDLPRSTNRTHISHVRLDGIDCDSLKVSLFHNICGSVVNEHSGVLQCSFCKCACESVCARGFQLHLTIADDSADVLAWCVGQTAVEFLQISPDEYLELPEDERAMYLYTLQNESFVVAIANTRKRVDGCAVGDEAVPAWEITRAQKCE

SEQ ID NO: 70493 - protein, 322 aa, Zea Mays
MSSGDSSNVIPPNDIGVTFDDIGALENVKDTLKELVMLPLQRPELFCKGQLTKPCKGILLFGPPGTGKTMLAKAVATEAGANFINISMSSITSKWFGEGEKYVKAVFSLASKIAPSVIFIDEVDSMLGRRENPGEHEAMRKMKNEFMVNWDGLRTKDKERVLVLGATNRPFDLDEAVIRRFPRRLMVNLPDASNREKILKVILAKEELGSDVDMDSLANMTDGYSGSDLKNLCVTAAHYPIREILEKEKKEKNLAKTEGRPEPALYGSEDIRPLSIDDFKSAHEQVCASVSSDSANMNELLQWNDLYGEGGSRKKKALSYFM

SEQ ID NO: 70494 - protein, 646 aa, Zea Mays
MRHCWSAWLLALCLVSVQLLAPLVCERLLVAAQNLSPPALTPPLVKEVDDVVEHVWISCGLDRGSLEDVRKHFNYNHVFDILRTLSGKDTKDSSPETEDASKALSPEIKNTLLNCLSKHPLVVAAHESAKNLPIDYIKMLFALLRRDVAQGSTGAATTSAPPAAVKSNPSPSLGEPSSTKPDKNPDPPLETTPEEKMVPQTEKTVAKKEDNSNMSITAVIGLSVSAIALLALLCLCNFVCRAKQASSSEVGVDKPPLNQNLSNLSVASLKFSKGNSIDVNKLGALPLKSEAGQNGNAKLSSSEISKTEVTPAVYNCLAEPMAASTGYVPGSRPTTPPSMPPPAPAHPKAPPSSTPQAPASLKAPPSSTPQAPAPLKAPHSSTPETPAPPSKPSSVLHSEPSSPSALKAAPPPKDAPQPKAAPPPPPKSTGPPPPAMSGSSNTRPPPLMKKSGNKMDDGANSHEAKTKLKPFFWDKVTANANQSMVWDHLKSGSFQFNEGKMESLFGYNSVEKIGGDGKKDLLSKDIPQFVRILEPKKAQNLAISLRALSVSPEEVCSAVKEGNELPSDLIDTLLKWIPSNEEELRLRLYTGELSQLGPAEQFLKSIIDIPYIFQRLDALLFMSSLPEETSNVKHAFATLEVMKLQM

SEQ ID NO: 70495 - protein, 94 aa, Zea Mays
MASSAAYPDADENLEAIITRIEQKSRKIETLLKQSKPVEALKTALEGSPLKTRDERCKSANWIVVHRALMAIRDVDGMFNSLDPEYYDILMNYY

SEQ ID NO: 70496 - protein, 123 aa, Zea Mays
MSRSLREPSGRGSLPAHWLPRGTLTPPLPSWTSRVRGLRISPRLQENLCTGCRRLIATIIPSGFKWIWNSVKGFLDPKTSSKIHVLGSNYQSMLLEVIDSSELPEFLGGSCTCSDKGGPLGSC

SEQ ID NO: 70497 - protein, 991 aa, Zea Mays
MAEGSSSHRRSAFSPGLAVLLSGDEAKISSQKSHLVSYHDEIGHQAVERTIEHIFDLPHKSVVRPPGPVDTGFVHSVVRNQARKFDLDWENCIRGYHRSVFIVDKGAGQRKVVLDDSSICGSFRNVRGPSLVESSAPFSSARANACVWKGKWMYEVTLETSGVQQLGWATLSCPFTDQKGVGDADDSYSFDGRRVTKWNNDPKPYGQPWAVGDVIGCCINLDAGEISFYRNGTSLGVAFDGIRSVEPKKGYYAAVSLSEGERCHLNFGSHPFRYPVDGFDPLEAPPRSWSFVTYLLRCLFRLLEVHNLEKSESAYFEKLRRVKKFAPLQELFGPISEGICAEIFSAIEASQGCLEYIAWGSLITLLLDVFRTREPHDFSCLDQVLDLFLRFPGCTSLFQELIVALSCMCKVAPLVLTECPYSGSYPFLALVCHLLRHKDVMCLWWKAEDFVFSFEGFLTRKIPNKQDLQCLVPSVWWPGSSEDEVSMTLTMTTLSDAIKKIEEMHRELCSLVICFIPPMSTPQPPGSVFRSFVQSLVLKARGGDHRMVVNGTFNNTVLVSLYTVILHLLSEGFSMDSAGSASSSKANFGNGVGFLHKGGKRKFPTQLFFRNDAYHSVIPRIGGPPSILMHHQFDAVENEVQWDEGCMNDEETRVTHTTAQKPCCCSVTDVAVGLRYKETAKYVPSTSKGSCKPMPERSPHVAAECNGRGLSDEIEDKPSTSAQSEIEYGYQSLHSLENMPMATQSSSETLKEEELLDVMLLLYHLGISPNFRQAFYFMSQQSQSISLLEETDRQIREKSCSEQVRRLKEARNSYHEDLVDCVRHCVWYRATLFSQWKQRGMYATCMWVVELLLVLSNSNSMFHYVPEFYVESLVDCFHALRRSDPPFVSPALFLMQGLASFVTLVVKHFDDTRIYKEFMLVFENNREAINKMPRSLLSAFDNRSWIPVTNILSRFCKGSGFASYKNGESASSATFQLDNDRVLYVHPGDAR

SEQ ID NO: 70498 - protein, 55 aa, Zea Mays
MIWMDLAWSLLQHAVRGRKKTLRSPTTTMASTSCCGISARRGTRCPGPTYRRRTC

SEQ ID NO: 70499 - protein, 87 aa, Zea Mays
MPSALPPLHRRPSSMQSRAIREATVPSTTAIVSDLSSSTAISALSLLSSTVVFRGTMYSTMLSPRPSTWSSPRSSTRSSPPRSEPQC

SEQ ID NO: 70500 - protein, 80 aa, Zea Mays
MKGGLLVALAPRPLYMAARTELNESADAEEASDATRQRTALAFTCWHSPCTRPESSARDATCDRPCAPLPSRAPSGLPAT

SEQ ID NO: 70501 - protein, 234 aa, Zea Mays
MSSGEDGYCSSDSPRAESPDQPQAAAAADADADAESPRAGAGPNKRDLHASSPAAKRSGYYRCSSSKGCPARKQVERSRADPAVLLVTYTFDHNHEAPRPKSSCCHQQGRPPAPKPDEPVAEQEDELGPEHEPEDEQEPEQKVVPGLAGPETAPATATLAPVAEEDESFDLGWFDQYPTWHRSALYAPLLPPEEWERELQGEDALFAGLGELPECAVVFGRRRELSLAATAPCS

SEQ ID NO: 70502 - protein, 449 aa, Zea Mays
MVAASSTVVEVAVAAAAAAASALPQEQQAQPRPRPMHAGGANGRHHAYSRKDKSLGLLCSNFVVLYNREDVESVGLDEAAKRLGVERRRIYDIVNVLESVGKILSRKAKNRYTWIGFGGIPMALLELKERALRDKSGLASQQTEQQSAATISDDEDDDTLGKEVANIENEKLSQTVNNPSDKPGAPRCRLRSDHRKEKSLGLLTQNFVKLFLTMEQVDTISLDEAAKLLLGEGHEETNMRTKVRRLYDIANVLSSLNLIEKIQQGDSRKPAFRWLGRATTPDTENGVTVVVPPPGKTKSNKRAFGTELTNIDMHRSNLDSKVQKKAKLAKSGGDVLINCKLDSGGDVLINCKLDVRNRLGQGKQSGIVYGPFHPAGARKHELAGGNNPGQREMAEDWKSLSAPFRPQYKNQALSDLFAHYVDAWKTWYSEFAQGSNIMQQHFGHFDATK

SEQ ID NO: 70503 - protein, 52 aa, Zea Mays
MLNKPSESSFSPLLRTPPKPKLLHPTHVFGIPACRRNFIASPFDSLAAFDKG

SEQ ID NO: 70504 - protein, 233 aa, Zea Mays
MTKNFRQDSLLGGGGFGRVYKGFITKDLREGLEIEEPTRVAVKVHDGDNSFQGHREWLAEVIFLGQLSHPNLVKLIGYCCEDDHRVLVYEFMPLGSVESHLFSRVMVPLTWSIRMKIALGAAKGLAFLHEAEKPVIYRDFKTSNILLDEEYNAKLSDFGLAKDGPVGDKSHVSTRIMGTYGYAAPEYIMTAMVLYYWSSSRAGSHWTSPGQSGSRCWQTGHSHCWHRRRRCLA

SEQ ID NO: 70505 - protein, 88 aa, Zea Mays
MLLEPYNQIDHPECKSRPDSGLSAITELDPGYITGPLSSVWKEWVKWCVEFGIEANAIIAVPYDWRLPPSMLEERDLYFHKLNRISKS

SEQ ID NO: 70506 - protein, 161 aa, Zea Mays
MAVGGLLRGLVSPPAWLPCHELFASWHHWLPSLPRLRPPASDGFKLLLVLLLFSAALAEVRYIASSSMAPTLRPGDRAVAEKVTYLFRRPSIGDIVFFKVPTAVQNYGVNKDVVFIKRVLATPGDFIEVRQGQLIVNGVALKEHYAAATSLYTMEAMVAPS

SEQ ID NO: 70507 - protein, 394 aa, Zea Mays
MICNAVAIAGFLNATLIIPNFHFHSIWRDPSKFSDIYDKDHFVQRLQNDVRVVDEIPDFMMERFGHNLSNVFNFKIKAWARIQYYKDVVLPKLVEERVIRISPFANRLSFDAPSAVQRLRCLANFEALKFSKPIVSLSETLVSRMRERSAESDGKYISVHLRFEEDMIAFSCCVYDGGDEEKKEMDAAREIGWRGKFTKRGRVIRPGVIRMNGKCPLTPLEVGLMLRGMGFSNKTAIFLASGKIYRAEKNMASLLEMFPLLQTKETLASEEELAPFKNFSSRMAAVDYSVCAQSEVFVTTQGGNFPHFLMGHRRYLYGGHSKTIKPDKRRLVVLFDNPRIGWKALKRHLLNMRAHSDAKGIEMKRPSESIYTFPCPDCMCRLNRTEHSKSKHSR

SEQ ID NO: 70508 - protein, 133 aa, Zea Mays
MEALVVRQLGDPTLPPGGEASPFAAVSGDHPVPEISSPTAVRVRVAATSLNFATFLQVQGKYQERPPLPFVPGSDYSGVVDAVGPGVRGLRPGDRVCSFTGLGSFADFIVAEEKQLCYLFLVLLVVSGHLLCK

SEQ ID NO: 70509 - protein, 93 aa, Zea Mays
MVLGSLELVTCPVIWSKRVGRAPLCSFPVHGAGSSSRSTPPSPWLASKPQWPSSPAPSSSMADVHVALLQVPPVGGLPLPKVLKNMTNHLLSA

SEQ ID NO: 70510 - protein, 640 aa, Zea Mays
MPIDMPRGLPFAVDTWGSSSRSRRHRFLTHAHRDHLVGAGADIDGGGIVYATRLTLHLALRHFPQLGSWEFVEMEVGRTLVVDDPVGAFSVTTYDANHCPGMRGGLSLASFVISGAVMFLFEGQFGTILHTGDCRLTPDCVQNLPMKYITKKGNENICRLDFVFLDCTFSKCFLKLPSKDSAIRQVISCIWKHLHAPFVFLACDLLGHEDILVEVSRTFGTKIYVDRKLDCFKALSLTAPEIITDDSSSRFQMVGFHQLHDRASKELAEARANLQPEPLFIRPSTQWYATCARSPKPSLTEAEQDELGIWHVCFSIHSSRDELEQALQLLQPHWVISTTPPCFAIELSYVKKHCFKTRLTADDPLWKIFRDPLGKSVSSPCSVLATQTDENNSNFVVDDDHSSSSSDGCTYLNVISTLELKFVPPQPPEEPDITLFGRARFASQAIDFMKEDYIALEEARACAPTDSVHGSSEEVETYSGMDFGVKQPPASQQDLMEVGDDVSFKKVGDDVDSCKHEVTSTQLEGFRVKSLPTVQSNMLVVSDQLERSEVVGESKLLKSTEDLNLTIVRSAERTDCQKEPLCYIGSSKCLNASLKRFYRSRNIPVPRPLPSLVKLMESTKRVKIQPNTNYTLLNSRHSLP

SEQ ID NO: 70511 - protein, 201 aa, Zea Mays
MRRASKKSLSSAATASAGPTKAVSKEVERIDQFFYTYADNSSVMIDPEGIETLCSHLEVPHTDVRILMLAWKMGCEKQGYFTLDEWRAGLKALRADSISKLKKAFPELVQEVTRPSNFQDFYIYAFRYCLTEDKKKCIEIPVACELLNLVLGLQFRPQVDKLSNYLKAMDSTFLCGSTHPFFMKTRCSIDMLYLDCVSVPK

SEQ ID NO: 70512 - protein, 193 aa, Zea Mays
MGLSGCSSLSLSLPCLTHKKANKQQIPQGLTCALDKPLEAATAENAPYKTDNEERVSDHCEERGGRSHRAPRLRPPDGACLPLDIICLHLEKAAMDRLSSGEELVGDDDVARALLGACKGLRPVLAVYDQLLSNGAIIPSLNLKLRVLRSVLAILREWGISVIAHMIGTTSAGASFFLDGTFSLNQTGTANQD

SEQ ID NO: 70513 - protein, 319 aa, Zea Mays
MATRNRTPLYRKYRDALRHVRAPAGATSSSCGGGGGSVIEMASLLRSDRPYAPLSIEDPSASRGAVSVGLPPAWVDVSEEISANMQRARTKMTELAKAHAKALMPSFGDGRDDQRAIEVLTHEITDLLKRSEKRLQKLSMKDLSEDSNVRKNVQRSLATDLQNLSMEFRKKQSSYLKQLRQQKEGQDGVDLEMNMNGTKSTFEDDEFDDVGFTEIQMSKLKKSEAFTREREREIEQVVESVNELAQIMKDLSVLVIDQGTIIDRIDYNIQNVAASVEEGYKQLQKAERTQKKGGMVMCATVLVILIFIMIVLLILKTIF

SEQ ID NO: 70514 - protein, 633 aa, Zea Mays
MDPCRGRSSSRRGSIAAGAGHGHFDADDDAAALVPPPYRLFPEPEETAARDIQLRQFFSVDRRQPPQLEASWRQQLPAFYPGGGVTVADPSSQLATMGAQDATALSVQQGRARTAAENLVHVPAAQVSLPGALALGNFEQELGEDALLPPVLSQEQQDAVKRYNHLMGVHVAYFRVCIDPTVASSRRLLQQAIQDLKNHCAGDALVAHYYVNNRNNNDPADQPDTTTAIRQQAIARSADASSRQHHGACRGFNDHHGGGVVPSVHREEEEALAAPVVAMSMSPALRLVDIKGKVAAFCADRNGSRFVQQALEAAAPEEIAMVYKEIMPCVRTLAVDMFGNHAIQKILEHGPRSCKRGVISNLIGHLLPLSLDKYSCRVVQKSFDVGEHDQKVAMAKELGSKVLRCVRDQFANHVVQKCVECLPSKDIHSILRSFYGRAKALSTHPFGCHVIQKVLARCKDHEIYHALTAEIMENVNKLAADRFGNYVVQQLVEHGGGAMRSAMVRRFAGRVVGMSYHKFASNVVEKCLAFGSQEDRRLIADEIVAGGGGGQQQHLDHLVDMMINPYANFVIQKMVVTAEERQVRLLLEVASSNAASLARYAHGRHVIDAMERFLGGAKAVVHADPAALPCRRR

SEQ ID NO: 70515 - protein, 147 aa, Zea Mays
MVSPAPGCRDSGEDGGKAEWLIYAFVARGIAVLAEYTEFTGNFPAIAAQCLQRLPAGSSSASTGPDGRGGAPVRFSYACDGHTFNFLLHRGYAYCVVAKESVPKNVSVAFLERLKDDFMKRYGGGKADTALAKSLNKEYGLWTAEKS

SEQ ID NO: 70516 - protein, 780 aa, Zea Mays
MASASTAVRMLPDGGADDEERWLAEGIAGVQQNAFYMHRALDSNNLKDALKYSAQMLSELRTSRLSPHKYYELYMRAFDEMKKLEMFFREETRRGSCSVVDMYELVQHAGNVLPRLYLLCTVGSVYIKSKEAPAKDVLKDLVEMCRGIQHPLRGLFLRSYLSQISRDKLPDIGSEYEGDAETINDAVEFVLQNFIEMNKLWVRMQHLGPAREKEKRGKERNELRDLVGKNLHVLSQIEGVDLDMYKETVLPRILEQVVNCKDDLAQFYLMDCIIQVFPDEYHLQTLETLLNAFPQLQPSVDIKTVLSQLMDRLSNYAASSPEVLPEFLQVEAFAKFSNAIGKVIEAQPDMPVVGAVTLYVSLLTFTLRVHPDRLDYVDQVLGACVKKLSGKAKLEDSRATKQIVALLSAPLEKYSNIVTALELSNYPRVMDYLDNATTKVMAVVIIQSIMKNTTCISTSDKIEALFDLIKGLIKDMDGAQDDELDEEDFKEEQNSVARLIHMLHNDEPEEMLKILCTVQKHILQGGPKRLTFTVPSLVFSALKLVRRLQSQDGDVTGEDVPATPKKIFQILHQAANDCDLEPVAYEFFTQAFILYEEEIADSKAQITAIHLIIGTLQRMNIFGVENRDTLTHKTTGYSAKLLKKPDQCRAVYACSHLFWADDQDGIMDGERVLLCLKRALRIANAAQQMASATRGSSGSVTLFIEILNKYLYFFEKGIPQITNTVIQDLIELIRTEKQSDNSVADPSTEAFFSSTLRYIEFQKQKGGSIGEKYEQIKTSS

SEQ ID NO: 70517 - protein, 246 aa, Zea Mays
MHQGRRSVVEDHLIVSHGRLACSSLAQYVASGFSRLCDHQNIMGSKVGLLRNARRWCMHDEAVVHYIDMIDQTTLGHRMIKKQFNKTPRAGWQIDPFGHSAVQAYLLGAEDDILMFDYNVEERVNDFVVVAIEQDGQVHALYSTPSIYTDAKHLSNVSWPVKYDEYFPYADSKNSYWTGYYTSRPTFKRYVRVLSGYYLAARQIEFLVGRRSSLGLFTTSLEDPMAIAQHHDAVSGTTNNTRQMTT

SEQ ID NO: 70518 - protein, 338 aa, Zea Mays
MEAKNKKKGSKMERVCENTVAVDFKQTKLNNFVPFIRSGEWSDIGGRDYMEDAHVCISDLAKNFGYDSVEDEVISFYGVFDGHNGKDAAHYVRDNLPRVIVEDADFPLELEKVVKRSFVQTDSKFAEKFSHHRGLSSGTTALTAMIFGRSLLVANAGDCRAVLSRRGTAIEMSKDHRPCCMNERKRVESLGGYVDDGYLNGQLAVTRALGDWHLDGMKEVGEPGGPLSAEPELKMVTLTKDDEFLIIGSDGIWDFFSSQNAVDFARRRLQDHNDLRLCCREMVDEAVRRGASDNLTAVMVSFHPDAPPPSRANKRTGRVTRSISAEGLHSLRVLLEGQ

SEQ ID NO: 70519 - protein, 143 aa, Zea Mays
MRIAPTSTSRSSWLMWLTPPSATTQESTGYAILCTSTVSSVVSPLQARSSVVCVARATLTTRTGRPGGPPGSATRPFPSAATVEHTHLDALLLWNPPHAGSLIVFGIFVSLLNFATCVTFEPLELRCLYHGASDAYESMKMIV

SEQ ID NO: 70520 - protein, 61 aa, Zea Mays
MHSKLSLTLKDAEPDSITKYSNTDLMPSNREISFKFSHVYVANKTFYLKRNVTTCITKNIP

SEQ ID NO: 70521 - protein, 256 aa, Zea Mays
MKTTIQLSKTGNAAIIVDPSSMQIVAKATDQTHKHDTPEGNTVSEANADVTCSLNESMGNGSNLSLPGSFLPKCDSLNMEISCINPWGWMKKKTCERKPLPCDGCFAWHPLRHAPMVAIENAAERDRTMFPSLASITKTDSNGNLEKYCDNEQAKRLKTDTKDNEPSASESFCGDLSETSRPYLCTGFDIYLVWEPCTMCAMALVHHRFKRVFYAFPNPVTGALGGVYMLHGERSLNHHYNVFRVSVPEAYSNGLN

SEQ ID NO: 70522 - protein, 474 aa, Zea Mays
MWPQLQLQELIGHYGKGTGYGTEAKISTAVDKWGRNVFEYPQPTFQKLMKEQIMEPFFVFQVFCVALWCLDAYWYYSLFTLFMLFLFESTMAKNRLKTLTELRRVKVDSQIVLTYRCGKWVKVPGTELLPGDIVSIGRSTSGEDRSVPADMLLLAGSAIVNEAILTGESTPQWKVSIAGRGPDDMLSIRRDKNHILFGGTKVLQHTADKSVNLRSPDGGCLAFVLRTGFETSQGKLMRTILFSTERVTANNKESGLFILFLLFFAIIASGYVLVKGLEDPTRSRYKLLLSCSLIITSVIPPELPMELSIAVNTSLIALARHGIFCTEPFRIPFAGKVDICCFDKTGTLTSDDMEFQGIVTSEGDDLISDANKLPLRTQEVLSSCHALVFVDNKLVGDPLEKAAIKGIDWIYTSDEKAMSKKPGGQPVQIVHRYHFASHLKRMSVIVRIQQKFYAFIKNFPKTAMSSLQEKNATT

SEQ ID NO: 70523 - protein, 792 aa, Zea Mays
MAPTAVDPGPSDHLLAPAPAAMAGGGDGGDGQMEVVFNVSSSDTDSDDLGAGGGKRSRPVAGQGGGRDREDKKARILAAAATVPAGFLEPLSPVRLLPPPAPGRSVTKQFWKAGDYVGKPDHLLAVVAAQHSDSGMDHVRVHPKFLHSNATSHKWALGAFAELLDNSLDEVVHGATYVNIDMIESKKDGTPMLLVQDNGGGMNPDKMRHCMSLGYSAKSKVKNTIGQYGNGFKTSTMRLGADVLVFSCSRGIEGTRPTQSVGMLSYTFLRSTNRDDIIVPMIDYEKENEWKRKARTTLTDWCMSLETIIQWSPYSTEAELIQEFGSIGEQGTRIIIYNLWEDDEGELELDFDADANDIQIRGVNRDQNKIKKANQFPNSKHFFTYRHSLRSYASILYLMLPDNFQMILRGKKIDHHNIINDLMLKKQLTYNPTVGDGLPKDMHVAAKVTIGFVKDARQHIDIQGFNVYHKNRLIKPFWRVWTSAGVAGRGIIGVLEVNFVEPAHDKQDFERTNCLARLEARLNRMQKKYWSDNRHRIGYGTNDASTDSVKRKTGLSLRPFGQGSWKSGYLQTIRSDGRSCSNTTNNIMNASMSSPETSKLSGPNREFSSTTVCQHRAEKSANTIRSERSVLHGLSNTDGGKTETANAPSKSTSPILRTSLPPTPNEGKRSERIAAKYQSKQVNATTNGDRESIVDPEAIIKKLKEENSSLKESYLGLPFSVWKITKADIIALIDKIDDRLPRWKAALMHQARRATMVKLVLIVIPIYRFIVLHCPKWVLKSIDKIRRGFLWK

SEQ ID NO: 70524 - protein, 855 aa, Zea Mays
MASGGGGIRATTSGRMKSRGWGDSSDDFGTPAIALRRGGDCSGTASSDSSAVFFAVAFCAPSPGLSVTAAAAMVEMRQRRKPLVLASTQALLDSLPGDRPPPPPQKPVRLKAGVLRFPSGGGGAEFGELASFVGIPAPALRRLAVVTGTPVLVKNTDNNVGRIVKAVLFGNPSLDKSCSEHTDQVVSASLSGHAMGFLPCRTFPAIGFTSMDEDVGYVSPLLAFNLGLHVSCLKLLIQREGQPFKFCSRAEEIDATASSGSDLSLHLDLLPCPQVPKYALHLRVSVVRIPDCGVLASLKIYSSFGGSEYQDMVDQALNEYFKFDRFLARGDVFGIQNSWKCGSSCCLACNKQDNKLNPRNMIYFKVTGMEPSDEPILRVNCNETALVLGGAASAAIPPYSFFASSGNSVPLHSEVVEHLASVIAPALCPSDILPKIKFSTFLYGPPGCGKRTVVRHVANHLGLHVVECSCHDLMTSSESGAPAALATAFKEAQKYSPCIILLRHFDAIGNASSNEGPQSEQSGIASNIESVIKQYIGQRWVAKDSLPGKDVNGSSYLVEPECVSSLQIILVATADSSEGMQQSIRRCFRYEIDMKTMNEEQRNELISETLQGIPKVADESICDKFIKDLAAQTSGFMPRDILALVADAGVSFAHKIAAGKDSKAISKHTEVLPESSSATQNEEHHFSKEDIMSSLERAKKRNRAALGTPKVPNVKWEDVGGLEDVKKVILDTIQLPLMYKHLFSSKLRKRSGVLLYGPPGTGKTLLAKAVATECSLNFLSVKGPELINMYVGESEKNVRDIFEKARSARPCVIFFDELDSLAPARGSSADSGGVMDRVVSQLLVEIDGLSDNSQA

SEQ ID NO: 70525 - protein, 104 aa, Zea Mays
MHALKNFNSLINTLGLCIHFKDCICNYDVAYESLALSKFVQLDTNIQTPQASTSSKGTCNSNIIRTYIVHFHKCIHFKSFIWEAVFLIPRYHSCPCHGISSIHS

SEQ ID NO: 70526 - protein, 137 aa, Zea Mays
MKYHEEYLDSIRILEEKWKVHQQSPKKQNKEAESTSNDTGEVHNLLQNEKMLRQSAEDEASDLKNQISHWKKLEATATAEIIKLQKMLDAEASQKEKLEEEIGVLRSQLLQMSMEADETRSLDKGDGPGKIFPGFRF

SEQ ID NO: 70527 - protein, 71 aa, Zea Mays
MSTLLYSSAWPCFIAAASYRACQTLCTICWMIIKLSYASCFVDAGSGERGIGGNPWRNSLAIQNCPMISSY

SEQ ID NO: 70528 - protein, 392 aa, Zea Mays
MAISTWSARLLLTPASSRATLSPPRPPTTNPLSSFFPRNRLHFVRPRPRPPCAYISAPAPGPEAAYAPPSLDATAAAADVAAAISSSDAVTWAGVWALLSRHRARIAVCIAALVACTTCTLSMPLFSGRFFETLIGRGNEPLWRLLSKIAILYTLEPIFTIIFVINITIIWEQVMARLRSQIFRRILIQKMLFFDRHKVGELTGLLTSDLGSLKSVVSDNISRDRGLRALSEIIGTLCILFTLSTELAPVLGLLMVSVSVLVAIFKRSTVPTFKSYGIVQARISDCASETFSAIRTVRSFGGEKRQISLFDNLAHAYQNNGTKLGVLKSANESLTRVVVYVSLMALYILGGRKVNAGKLSVGTMVSFIGYTFTLTFAELLIPLVICVAHWLP

SEQ ID NO: 70529 - protein, 95 aa, Zea Mays
MDGEDNYNRNTDAQAGERVWHKCFIASANEDPKSRTTSWVANLNGNPQNYGLPISIPIQLNNQTLNMNWDHSHSTKWGSIHGTKASPIPYCSTSS

SEQ ID NO: 70530 - protein, 394 aa, Zea Mays
MYGPRGSGVPGRISKKVPKKDQVVVLLDPERQVIRREGEVPIADFLWYSAAKPCTRNCFDRAEIARVMNAAGRRPEALPQDLQKGLDLGVVSPEILQNFFDLEKYPVMTELIHRFQGFRERLLADPKFLQRLAIEEVISITTTLLAQYERRKGRFFEEIDYVLTDTIRGSVVDFFTVWLPAPTISVLQYADDGSGSSLEFVKGLLGSLPDNAFQKNILGQDWSIKQRIAAVLVGGLKLASVGFISSVGAGVSSDLIYAARGIVKPSENVETGRKRSPIWKSAAVYSCFLGTSANLRYQIIAGLVEYRLGESLVTYYNQPLIAGLLSFVARTLNSYWGTQQWVDLARYTGLQRSEEKPPAEATMPPDSAHLEGCTTEGHDFDDSSNNTNKSTGPS

SEQ ID NO: 70531 - protein, 52 aa, Zea Mays
MEEDDLLGEDLVDYEASPERPGMDVNVITFSTDCTIVGDDEPVVAQFDFGPK

SEQ ID NO: 70532 - protein, 1526 aa, Zea Mays
METVDEAEVEEDKFEVDTSGIVLRNVAVREVDPKDEHNAKDVFVVDSSGTAPDNAAVEEVVDEAEVEEDMVDVDILGLDLNNATIEEIDLMEEALLENFDVDSPGNASSGRTYGGVDELGELPSTSVDCIAINGKRRSLKPKPLPIVRFQEQEQIVLSIVDEEGLIASSCEEGQPVVDYDKQEENSTAFDEQKQLTDDFPEEGISIVHFPEPNNDIVGSSKFLEQKQELDGSYKQDRSTTGLHEQDQSVVSSHGQDKSIVGVPQQIQYNDQSIAGSHRQDQSIAGAPEQIQSVAGYIKPNQSIVGSCKQHELIIPEPKKIESIISYNEIDQSIVGSHKQDKSVVSVPEQIQSIVSHSKPNQSTVDSYRQAESIIGVPEKVQSITSYDKLDQSIVGSLKQDEPIISVPEKIQSIVHYTKPNQSIVGLPKQQQSIVHIVEPKQSIDGFPKQDLSIVGISNEFQTKQLATVGTHDGLLMKGVEAKETSQKTEGDTLQATFNVDNLSQKQEGLTKEADEITIIEKINDEDLVMIEEQKSIAMNEEQTIVTEEDIPMAKVEIGIDKAKFLHLLSEEESSWDENEVGIIEADEQYEVDETSMSTEQDIQESPNDDLDPQALWSMLQELAEKNYSLGNKLFTYPDVLKADSTIDLYFNRDLSAVANEPDVLIKGAFNGWKWRFFTEKLHKSELAGDWWCCKLYIPKQAYRMDFVFFNGHTVYENNNNNDFVIQIESTMDENLFEDFLAEEKQRELENLANEEAERRRQTDEQRRMEEERAADKADRVQAKVEVETKKNKLCNVLGLARAPVDNLWYIEPITTGQEATVRLYYNINSRPLVHSTEIWMHGGYNNWIDGLSFAERLVHHHDKDCDWWFVDVVVPERTYVLDWVFADGPPGSARNYDNNGGHDFHATLPNNMTEEEYWMEEEQRIYTRLQQERREREEAIKRKAERNAKMKAEMKEKTMRMFLVSQKHIVYTEPLEIHAGTTIDVLYNPSNTVLTGKPEVWFRCSFNRWMYPGGVLPPQKMVQAENGSHLKVTVYVPRDAYMMDFVFSESEEGGIYDNRNGLDYHIPVFGSIAKEPPMHIVHIAVEMAPIAKVGGLGDVVTSLSRAVQDLGHNVEVILPKYGCLNLSNVKNLHIHQSFSWGGSEIKVWRGLVEGLCVYFLEPQNGMFGVGYVYGRDDDRRFGFFCRSALEFLLQSGSSPNIIHCHDWSSAPVAWLHKENYAKSSLANARVVFTIHNLEFGAHHIGKAMRYCDKATTVSNTYSKEVSGHGAIVPHLGKFYGILNGIDPDIWDPYNDNFIPVHYTCENVVEGKRAAKRALQQKFGLQQIDVPVVGIVTRLTAQKGIHLIKHAIHRTLERNGQVVLLGSAPDSRIQADFVNLANKLHGVNHGQVRLSLTYDEPLSHLIYAGSDFILVPSIFEPCGLTQLVAMRYGTIPIVRKTGGLFDTVFDVDNDKERARDRGLEPNGFSFDGADSNGVDYALNRAISAWFDARSWFHSLCKRVMEQDWSWNRPALDYIELYRSASKL

SEQ ID NO: 70533 - protein, 315 aa, Zea Mays
MINEYRCGRTPNPDVLCNTRIKFGSFLEAIENLGFDYIASGHYAHVVHPSAENTEAPSVLQLSKDKIKDQTYFLSHLSQSQLRRLLFPLGCITKDEVRRLATQMGLPNQGRKDSQGICFLGKEGIILEAESGDYLGIHRGFWFYTIGQRQGLRLPGGPWYVVEKDVQNNVVFVSRNYYSLDKRRRTFRVGSLNWFDNCGPGNNEQLKCKVRHSPEFHDCTLVKERSEENGDALVVHLAEDDQGLAAGQFAAFYSENVCLGSGIILDSWDKMSFPVCSRALEIAKLADKSSLGKPIRIVNLEHIVKPEQQEEIKVA

SEQ ID NO: 70534 - protein, 107 aa, Zea Mays
MTSFNSPSLQHIRKLQLTTALWAGKANAEPPSAAAHLPCRSPILHVLLVLTGILSTGADIPLLETTLAPKRPRSETSSSAGLHLPRTPEMCPCQTNEQAPVPLMIPL

SEQ ID NO: 70535 - protein, 605 aa, Zea Mays
MRRRGQVQCFQLQQDRKIIGAKWYIKGYEAEYGKMNTTDIYEFMSARDAVGHGTHTASTAAGALVAGASFRGLAGGVARGGAPRARLAVYKVCWATGDCTSADILAAFDDAIHDGVDVLSVSLGQAPPLPAYVDDVLSIGSFHAVARGIVVVCSAGNSGPYSETVINSAPWLVTVAAGTIDRTFLAKIILGNNSTYVGQTLYSGKHPGNSMRIFYAEDVASNNADDTDARSCTAGSLNSTLVKGTVVLCFQTRAQRSAAVAVETVKKARGVGVIFAQFLTKDIASSFDIPCFQVDYQVGTAILAYTTSTRNPTVQFGSAKTILGELMGPEVAYFSSRGPSSLSPAVLKPDIAAPGVNILAAWTPAAAISSAIGSVKFKIDSGTSMSCPHISGVVALLKSMHPNWSPAAVKSALVTTASVHDTYGFEIVSEAAPYNQANPFDYGGGHVDPNSAAHPGLVYDMGTSDYVRFLCSMGYNVSAISSLAQQHETCQHTPKTQLNLNLPSISIPELRGRLTVSRTVTNVGSALTKYRARVEAPPGVDVTVSPSLLTFNSTVRKLTFKVTFQAKLKVQGRYYFGSLTWEDGVHAVRIPLVVRTMISKFYANS

SEQ ID NO: 70536 - protein, 711 aa, Zea Mays
MARKHGWQLPAHTLQIVAITVFFLLVVAFYAFFVPFLGKQVVEYIAIGVYTPVALAVFILYIRCTSINPADPGIMSKFEDGLINIPTNGSGIEGMNLPQKVNNATGTNSPMSTCRSSLDGHSNQRGSSIGEANMNLGSQLPKKRSSCWLLGGLLCATFVKEDCRKTDDSEQQANGEEALFCTLCNAEWLNNCVGRKNYFTFLALMAISLIWLAIEFGVGIAVIVLCFVDKNASRNIQDKLGNGLTRAPFAVIVGITTYDYVVAMRAMSEAAPEDEEGENIIYSPSNSATTGFSVGSSLGIHHKGAWCTPPRIFIDQDEVIPHLEPGMVPSTVDPDGAGYPERANRAKKAVKISARSLAKLDKNEVMKAAAKARASSSVLRPIDARHGHEADVISSGSASVRSSMSVDYSGTKESNSEMKLSPLHNSYPQSLASQDEYDTGTPTASSLSSLVNIHKLASHSQFSAAPRPAPPERPVPAMVRPPVPTTQITNPGIPRPAVPTTQTTNPMFQSATSYVRENRRASVVWDQEAGRYVSVPAQTRTGTGADLPARNPRFLANPSGEPSSHVRGVAPGNTSSSAMPSGQPSERLTYSGQSIFFGGPMLNTPSLGAQRNEAGARARPEGSRDPNAQQRDIRGEKARTGSLPVFAPGTILQRQKGQADKTSRALLVCFTPSLLPTAPVPVPHHWHSGEGIPVPPPALAFCLPAPTRPCG

SEQ ID NO: 70537 - protein, 522 aa, Zea Mays
MRPAPETSTRRPQLRRRRPVPLVTVAVSLALISLACLPVFADASRALHRDREEHRRQHHRTEDKKSRVSLPPDADGDSPPEPPDSGGAPPPADDSDCGNVFDVRAFGASGDGSCVDDDTAAFRAAWKAACSSDSAAATLLVPSDGVFTIASTIFSGPCKPDLTFQIDGVLMPPDGPASWPATDSRKQWIVFYKADRLTLAGEGTIEGNGEEWWDLPCKPHRLIRFFSSNDVTVCGLRIENSPQFHLRFDDCERVRVDGLFVSSPASSPNTDGVHVENTKSVQILNSRIYNGDDCVSIGAGCSDVHVENITCGHGHGIRYLSVCHSLTHQRASMARGTVCSEPDAASCCCHPRSIGSLGVHNTHACVSNVTVRNVRILDSDNGVRIKTWQGGAGAVSAVEFTGVQMQNVKNCIVIDQYYCLGHGCANQTSAVRVAGVAYRDIHGTYNPQAGAPIRLACSDAVACTDITMSGVELLPAGGDDGALLADPYCWNAYGVMETLTLPPVYCLLEGSPESLQDPLTSC

SEQ ID NO: 70538 - protein, 804 aa, Zea Mays
MVETRRSAAAKRSAAVVEEEKGSLASPALEPAEDAPAGLGAGDDVASSQPPKRAKVGCTESDTAKPSVAPAAGAVAGPLPNTAGLQARTGAMDKLEAFLKSKEAQSNPAGHKQGTNDKDLSAKMKRVMDLSEDISEKIKRSKDRLAVLLNKPAAGTSRRQEPWCRLISQHSMHPTLSIYGAIFTIGHGAHHDFRLDESSTASSVCRLKQAKIFEQLHEEKSSTSVLSSTCTCSSIQLGQHSHFNDIQDHVSSKGRKASSFLFGRGLSADPLNICKTTEGRSQFISEDNISSGRCQLLKEDLINATVDVSDISESFDSCPYYLSEHTKHALMSAAFVHLHCKNYFKFTKDISSLSQRVLLSGPTGTDMYQEYLVKALAKYFGARLLTIDSSMLFGGQTSKESESYKKGDRVRYIGSGIILDGQSPPDFGSQGEIFLPFEENRSSKVGVRFDKKILGGNNLGGNCEVDHGLFCSVDSLCPDIPGWEVTFKHPFDVIVEFISEEIRHGPLILFLKDTEKICGNNDSYHGLKSKLKHFPAGAFIIGSQIQPDNRKEKANVSSPFLSKFRYSQAILGLTLQDIDGGNDNNKETSKAIMKHLIKLFPNKVTLEAPQAEMELSRWNQMLNRDIEVLKGNANISKIRSFLTRLGLECTDPEAILVTDRILTNECIDKIIGFALSHQLKNCTNPDPPLGSVQFALSSGSLKHGVDMLKSIQSGSKSSTKRKSLKDIATENEFEKSLLADVTPPHEIGVTFEDIGALESVKDTLKELVMLPLQRPELFNRGQLMKPCKGILLFGPPGTGKTNAG

SEQ ID NO: 70539 - protein, 440 aa, Zea Mays
MAEHKGNVLLHKYEMGKLLGQGTFAKVYHARNTATSESVAIKVIDKEKVMKVGLIDQIQREISVMKLVRHPNIVQLYEVMATKTKIYFVLEHVKGGELFNKIQRGRLKEDAARKYFQQLICAVDFCHSRGVYHRDLKPENLLLDENSNLKVSDFGLSALAECHRQDGLLHTTCGTPAYVAPEVINRKGYDGAKADIWSCGVILFVLLAGYLPFHDKNLMDMYKKIEKADFKCPSWFSTDVRRLLQRILDPNPSRRISMEKIMENPWFRKGLGAKLLRYDLQNKNAPHVDKNADFDSLSANITTESKQHEEKKPINMNAFDIISLSTGLDLSGLFEESNKKRESKFTSTNTSSTIISKIEDIAKNLRLNLTKKDGGLLKMEASKPGRKGVMGIDAEVFEVSPNFHLVEIKKTNGDTLEYQKVLNQEMRPALKEIVWAWQEK

SEQ ID NO: 70540 - protein, 353 aa, Zea Mays
MKNPNPPPSRPSAAGKEPPAGMAPPRKSRWGPPPPGVAGDKAAPSTSARRTPTPTPTRTADSRRHPGAPHAPAPHARNPGSQAVALRPQARPQPPAVETPPPQPYGFHNLDRRVMPLADGTVRTYFALPPDYSFEPVPLPPLPHRLLPRAAPDLWPPPLHLQMPPHEARRKHPAEQDEGFARHPKQPRLDEPHQPPPHAKVDGHALRRAFLKYAKMLNESSAQRRSYLEGGRVPCLACGRSSKDFADVHGLVMHAYNPPNADSLVDHLGLHKALCVLMGWDYTKVPENFKGYQSLPSDLVQASREDLIVWPPTVIIHNTSTGRKKDGRLEGLGNKEMDKKMTVPTAELRRQYS

SEQ ID NO: 70541 - protein, 109 aa, Zea Mays
MRSSPKRLHHGRSQEAASVDPHISFGPPLAPRDLLPVQPRRLSEREQSAWRSRAGCNVRCRCYLWPWYRCHLLLPKSRCLLWASTTWLSLLQAQSLPRALLQAGTPSLR

SEQ ID NO: 70542 - protein, 602 aa, Zea Mays
MEDIEDVLGAAGLSGGGAPPGLRLPLAAVAVKPKRRSSRVAQAPPQPEAGIPGTQTIYVKTFGCSHNQSDSEYMSGQLSAFGYAITEDPEGADLWLINTCTVKNPSQSAMTTLISKCKNANKPLVVAGCVPQGSQGLKELEGISIIGVQQIDRVVEVVEETLKGHEVRLLSRKTLPSLDLPKTKHARGHLGSYTIDSLVDRVKTVVSEGVREIWLSSEDTGAYGRDIGTNLPNLLNAIVAELPVDQSTMLRIGMTNPPFILEHLKEIAAVLCHPCVYSFLHVPVQSGSDSVLKAMNREYTVGEFRKVVDTLCELVPGMQIATDIICGFPGETDEDFSETVNLVKEYQFPQVHISQFYPRPGTPAARMKKVPSNEVKKRSRELTSVFESFSPYQGMEGKVEKIWITEIASDGVHLVGHTKGYIQVLVTAPDSMLGTSADAKITSVGRWSVFGVVVEGSVAVIEAPIQTSAELQEEHVQNQVEEAGCCATDSCGACACSNEAQPCGPDRCGDALRAPQTCGGDVVTTRQEALQPTLVRRSVDGTTKGSDSTAAHSAGKEQRVEVVTRRGVDIDTVLWCGLAASFAVTVALLALLTSKILSTTSH

SEQ ID NO: 70543 - protein, 116 aa, Zea Mays
MAASLAYLAQQPRRQFAQPRESPLRHALGVLDIMPQQACSSSPGSPPHREQPRRRSVQPRRLRVLLRRQSAQSPSRCRRNPRPLSLSRFARRFSTESQTNMHACTTPIGFRPGCSI

SEQ ID NO: 70544 - protein, 75 aa, Zea Mays
MLRARGFLSPPFISLQPSRPSSLLGHGGRGSLISCSPGHAELHPGPESLCSDFVGPASSPTRSYSSSVFLHRGSP

SEQ ID NO: 70545 - protein, 204 aa, Zea Mays
MRFIYVPSPHTVEVIAEELNESLVAWNLDEKVSTPTVDNFSTNDKVIDLLVRKIGKDKLMLKGSTLHIRCCAHILNLIVKDGLDIIHKAIERIHDSVAFWTATPKRVEKLEEIAKFVKDTITKKLCLDCKTRWNSTFTMLSVALPYKVFLFMLCVLRNNINVVLVKKNGHLSMMWLIGCVCFMKSHKCSLEPNMLLLISCFQRF

SEQ ID NO: 70546 - protein, 223 aa, Zea Mays
MEAVMLDLLRIVGHHKARLATQIRTVQKSYGNADFDNIPFGEDMYSRVRGRPLLIDTSARISDDKPRPRPVSSREEQKVKTNGSVDIKSSSPENASSSNSEKQEPKKMVPEDTRVKNIKGDNVMPVTPSLDPATSTSKAGKGKTREPEPTERQGDGSVSVANPKKESRPVFEDNIVLGVALEGSRRTLPIEEGNPHLSLSETEVDTEEAASSPKDKIGQSPKL

SEQ ID NO: 70547 - protein, 101 aa, Zea Mays
MLDDMLQRAPPRSMPSRHRRAASSVVDLRNRCSVVVPPPSTSSMHEQQQPRDLRVACADPIRAAPTCRRRRLHDFWAARLRCRETQRNFMCVKRSKARGAC

SEQ ID NO: 70548 - protein, 321 aa, Zea Mays
MASTAVKLIDIAVNFTDGMFKGIYHGKQCHAADIPAVLARAWAAGVDRIIVTGGSLKESREALQIAETDGRLFCTVGVHPTRCGEFEESGDPEGHFQALLALAKEGLDKGKVVAVGECGLDYDRLQFCPADMQKKYFEKQFELAEAVKLPMFLHMRAAGEDFCEIMTRNLHRFPGGVTHSFTDSAEDRDMLLSFEKMFIGVNGCSLKTNENLEVLRGIPVERLMIETDSPYCDIRNTHAGSQYVKSVWPSKKKEKYEPDSTVKGRNEPCLVRQVLEVVAGSKGISDIEGLSRTLYHNTCRLFFPQDLDASANAQLESVAAA

SEQ ID NO: 70549 - protein, 279 aa, Zea Mays
MKELDETNALSSLQIETIVYACQRHHHHLPTGARAGFFIGDGAGVGKGRTVAGLIWENWQQGRHKALWISIGSDLKYDARRDLDDVGAKCVEVHALNKLPYSKLDSKTFGITDGVVFVTYSSLIASSENRSRLQQLVQWCGSEFDGLLVFDECHKAKNLIPEAGSQPTRTGKAVLEIQDMLPQARVVYCSATGASEPRNLGYMVRLGLWGDGTSFENFNQFLGALEKGGVGALELVAMDMKARGMYVCRTLSYKGANFDILESLLEERMMDIFVSMIAH

SEQ ID NO: 70550 - protein, 233 aa, Zea Mays
MSLEKLVIAPDLAIIRKHINDGVNGLLFPRKNIGMLAQVLLRAVSNSKVSLSGQKIASAGKAHAKNLMASETIEGYAMLLKNVVKLPTDALSPLTADEIPLALKQEWKWHLFDDVKHLHRVNTSLSGYKILQKLEQEWHSNQMENSSLSTKNINDAFSAIAWEEQRVNEVMDIKRKMEEDELKDRNDQPHGTWEEVYRNVKRVERLKNELHERDDKELERTVFKRSKTRSGRY

SEQ ID NO: 70551 - protein, 135 aa, Zea Mays
MHARRATDNAAPRGRPPPNPPLTSQHRRRPTCRAPKQRMQKKLRSDPIPQQKGCRPAPRRRRCPCVVAAAGRTQPWWSGGRRASTSVVVVVRPRRILPPFPFAFFPDRKRPFWEAVAPVLPPVDLRNAVLGWRHS

SEQ ID NO: 70552 - protein, 211 aa, Zea Mays
MRRYSALPNGGRQETLADRAHRYRGVVLVILAPLALVSLVLLLMPRSPAGTMGGARRSGPAGADRYAVIFDAGSSGSRVHVFRFDANLDLVRIGSEIELFVQIKPGLSHYANDPREAAESLVSLLDDAKRVVPAELRDQTPVRATAGLRNLGAQKSEAILQAVRDLLREKSSFKNQPDWVTVLDGTQEGAYELLSIICWGTWERLMQTQLE

SEQ ID NO: 70553 - protein, 370 aa, Zea Mays
MSLRPSEREQMRKGNYKQTVDAEESRRRREGQMVDIRKAKREESLQKKRRDGFPASAAGVPPMGHSTALQQKLDGLPAMVQAVHSNDPSVQLEATTQFRKLLSIERSPPIEEVISTGVVPRFIEFLTREDHPQLQFEAAWALTNIASGTSENTKVVVESGAVPIFVKLLNSLSEDVREQAVWALGNVAGDSPKCRDLVLGHGGLYPLLQQLNEHAKLSMLRNATWTLSNFCRGKPQPNFDQVKPALPALQHLIHSQDEEVLTDACWALSYLSDGTNDKIQAVIESGVFPRLVELLMHPSASVLIPALRTVGNIVTGDDMQTQCVIDNQALPCLLNLLTTNHKKSIKKEACWTISNITAGNKEQIQSQQLQ

SEQ ID NO: 70554 - protein, 207 aa, Zea Mays
MLQWAIGNSDPDKLREKAAELVKLSAEELLKRQMEIKELMEKFKAPSDAELIKIAIADLNNSSLEDRQRALQELLILVEPIDNANDEGIRTTSAWVLGKASQDNVLVQNQINGYGALDRLVKMGYSSSGPEAAKALYTISSLIRDNEHGQELFLSENGYAMLQHILSTTNTSVRLQKKVVSLLAYIADFQLNTGKSQAQSLLNHFFI

SEQ ID NO: 70555 - protein, 538 aa, Zea Mays
MARRSSSSSSGTWRYLNPAYYLKRPKRLALLFFVFVAATFAFWDRQSLVSEYESEISRLEDDINRLHDQLRKAGVNLDENPVVSNKNSRKDLVVEIDPVNNERREKVKEAMLHAWNSYVKYAWGMDELQPQSKNGINSFGGLGATLVDSLDTLYIMGLKDEFQKARDWVAESLDFDKDYDASVFETTIRVVGGLLSSYDLSGDKVFLDKAKDITDRLLPAWDTTSGIPYNRINLAHGRAHNPGWTNGDSILADSGTEQLEFIALSQRTGDPKYQQKAENVIKQLQKIYPSDGLLPIYINPHSGTASYSTITFGAMGDSFYEYLLKVWIQGNKTEHVKHYRQMWETSMEGLLSLTKKTTPSNYYYICEKNGGSLSDKMDELACFAPGMLALGASGYGPEKSEQIMNLAKEDMGVGTSWNILRPETVESLMYLWRLTGNKTYQDWGWDIFQAFEKNSRIESGYVGLRDVNTGEKDNMMQSFFLAETLKYLYLLFSPPSVISFDEWVFNTEAHPLRIVPVSDNKGIGTPVRQFGRKQGKPE

SEQ ID NO: 70556 - protein, 224 aa, Zea Mays
MAERAWIFSLPGVRQLGRSFLSAARRFPFPKLHGCCTSPAERLFPTALPPCFSFPLASSPRRRAPAPAIGRAPASMDAAPAACSPCFSSPSSFPSPSHGQLRAHPALSLFLSRPSLFFHGCSRFPPARPQPRIAPRVDAHRVLPQSALSPSPSSCRSSSRRVCSNVANSSMMLVNEPRFIDSSPSVRLMYARRMRSPLDPVSLELVTSLSSKSSLYSCSSQSSR

SEQ ID NO: 70557 - protein, 203 aa, Zea Mays
MQAEKCTSVGQEKNTSVKRNGQDNGITTSLSSSTRHVGACLSNNWDSRSGSMVPKVDVITSSASAVPVVASGVKPSQPVNNSVAKIVTSSKTAAKEFKLNPSAKVFSPSFASSRQVLAAAAPVDTYYISHSAPEVPMGVPVYEPKSVSGVSPLSNKVYCSNLSPANYAISPQYVPSVSASIYSYVFLIVSFISPSLDNTILSS

SEQ ID NO: 70558 - protein, 622 aa, Zea Mays
MKEEIMFDNQTKPCRSRVDSKSNSSSLKPKFGSSWGSQIVKGFTTDKKTKKTAANASKKPPLPSVENVNQANQQIPYHSRVKRSLIGDFPCSPAGAQVHPHVFDCHNIRSPASHDLFLELDHLREQLRESKERELTLQSELRQCRENPKVSELEKELDSMRDEVDRLARLKISLEAEKTSISEQLSALSSMEEHHEENVRLDSHGNRILTVDGDNAPSENLEFEVVELRRLNKELQFQKRNLAIKLSSAESKLAGLEKNEESDIVAKVQAEASLLRHTNANLSKQVEGLQMSRLTEVEELAYLRWINSCLRHELCNSDQAARATTDIDYNGGMAFNEDDNSEGDAKTSEDSSDIKFSIAERIKQWSQNDKSCQASKKESLLDRAWIEAAEARSPTRRHSLGGPKGCAQDFNIIKRRQSDTFISLPDATDESFAFNKDPAIREKRDLLVDKYDFGRSESSRFVLSKPEVCKSQCLDVEKRALRIPNPPPRPSVSVSNSGPSNGSTVNPPRPPPPPPPPKFSSKSTGVMKRAPQVAELYHSLMRRDSKKDTSGGGICEAANSANVRSSMIGEIENRSSHLQAIKADVETQGEFVKSLIKEVTSAAYKDIEDVVAFVKWWMREQC

SEQ ID NO: 70559 - protein, 205 aa, Zea Mays
MASVNLSAHAYWTPDPTFTSYLNYGAGTSEVEIDVLTGATTILRSDLVYDCGQSLNPAVDLGQVEGAFVQGVGFFTNEEYATNSDGLVIHDGTWTYKIPTVDTIPKQFNVELINSARDQKRVLSSKASGEPPLLLASSVHCAMREAIRAARKEFSVCTGPANSAITFQMDVPATMPVVKELCGLDVVERYLESVSAASPTNTAKA

SEQ ID NO: 70560 - protein, 54 aa, Zea Mays
MQLTLLHHHHGHSSFCSDAASALGTVARHHTPTSCLSYYIAFVAHEPRKKLMMM

SEQ ID NO: 70561 - protein, 242 aa, Zea Mays
MLQPEVVATQEHKFSAAFELARTDVGCVFANQGDNNVERIQRSKYFQALLQKSKANVSEQRNATCQEFSVQWAPCVDESQAEMENEKLSIRASKLMMQTKLTSLYSSKSLKTNGVPNKNMFKSENSSKVCAGVENRTSQNSNRRHAYLDVEEDEKSHGQLQNAKWKHTGFRSPIFEVANSPSSNDEADAPANEFTTAKRMMRFSVRAKVRQSGIRTGSTQALLVGASSQTNAELGVQWCRPP

SEQ ID NO: 70562 - protein, 952 aa, Zea Mays
MSTAKVVLEPAFQGAGHKPGTEIWRIEDFKPVALPKSDYGKFYCGDSYIVLQTTCKGGAFIFDIHFWIGKDSSQDEAGTAAIKTVELDSMLGGRAVQHREPQCYESDKFLSYFKPCIIPMEGGFASGFKKPEVDKFETRLYICKGKRAIRVKEVPFSRSSLNHDDVFILDTENKIYQFNGANSNIQERAKALEVIQHLKEEYHDGVCAVAIVDDGKLQAESDSGEFWVLFGGFAPIGKKAISDDDVVLETTSPKLFSISNGQLKLEDAVLTKSILENTKCFLLDCGAELFVWVGRVTQVEDRKAASAAVEKYIIKENRPKTTRITQVIQGYENHTFKSKFESWPVSNTSGSASTEEGRGKVTALLKQKGVDVKGISKTSVPVNDEVPPLLDGGGKLEVWCIDGSAKTALPKEELGKFYSGDCYVVLYTYHSAEKKEEFYLAYWIGKNSVQEDQEAAFQIANTTFNSLKGRPVQGRIYQGKEPPQFVAIFQPMVILKGGTSSGYKKFVEEKGLKDETYCSDGTALIQISGTAVHNNKTLQVDAVATSLSSTDCFVLQAKNSMFIWNGNASSFEQQQWAAKVAEFLKTGVAVKHCKEGTESSIFWSSIGGKQSYTNRNAAPDVVIREPHLYTFSLRNVTLIFHFHFLASIAITSSPFVREAGDDLLTEDMMILDTHCEVFVWMGQCVETKEKQKAFDIGQKYVQHAVAFEGISPDVPLYKVNEGNEPCFFRTYFSWDSARSVGGNKGSGDGGPTQRASALAALSSALNPSSQGKQSDEKPTSSDDSEHTQRASAMAALSSALNPSTKPSSTQTQSHSGQGSQRAAAVAALSNVLTAEGSHSPRHSRSSPTADADKTELVPTSPHQLETGTAEDVRTEPDVSQEQTAKENGGQTTFSYERLISKSTDPVSGINNKRRETYLVDSEFETVFGMTKEEFYEQPRWKQELQKKKADLF

SEQ ID NO: 70563 - protein, 66 aa, Zea Mays
MPWSSLLQLGILYSSTARTPGCTSLLGTCAELQPAVVYDLIVEFYDMRLDLTSLGHASMFLFVSIC

SEQ ID NO: 70564 - protein, 657 aa, Zea Mays
MSMDFGAPADDPKAFRNICRDRILKDLLKPDKDKETKSSWKVLIMDKFTVKIMAYACKMAEITDAGISLVEDLFKRREPMPSMDAIYFLQPLKENVIMLLSDMSGRCPLYRKAYIFFSSPIPKDLVTYIKNDSSVIPRIGALREMNLEFFTIDMQGFVTDHDTALIDLYGPSEQNSKKFNDTISTMATRIATTFASLKEFPCVRYRAPKGDASTTTKFDMVPKWLATAVWEIVSKYKSTIPEFPQKETCELLIVDRPIDQIAPVIHEWTYDAMCHDLLEMDGNKYIYEVSKMGSEPEKKESLLEDHDPLWLELRHAHIADASERLYEKMNNFVAKNKAAQLSRDGGEVSTRDLQKIVQALPQYSDQVEKLTLHIEIAGKMNRCIREYGLRDIGQLEQDLVFGDAGAKEVISILRSKQDMSPENKMRLLIIYAIVYPEKFEGDKGEKLMQLAKLPHDDMDIINCLGYLDGSNTKKSSRTGTFSLKFDAQKKKNAARTDKQDGEETWALSRFFPLIEELIEKLSKGELPLKEYPSMSEPSSASASQDATQTASSTARPAQNPQPMSMRSRRTPTWAKSRNSDDSSSSDSSVLRHASGDFKRLGNRIFVFMIGGATRSELRTVHKLTMKMKREIVLGSSSIDDPPQFISKLKSIGSATKT

SEQ ID NO: 70565 - protein, 227 aa, Zea Mays
MMEEGAPDLRELVRLPDVLVVCSSTGWTDEKHMLYLRLLEETFVHQLHGSGCIFKGLFNCSPRYCRQMKSSKQIVKYTTPGQGCAIVEGGKVKSCIKAEHVESPSCCGNQQDEKVRSLEDNASTTKPMEKATSHARAASPGQASTCYVGKHRHSPSRSAGIKFIYLSDVARFLKENYSCIYSEGSDQNFDEETQGTGESKHEYNPKRLKSADGTRDHQKLIRWAALM

SEQ ID NO: 70566 - protein, 283 aa, Zea Mays
MDFFSEYGDANRYKIQEVIGKGSYGVVCSAVDQHTGDKVAIKKIHNIFEHLSDAARILREIKLLRLLRHPDIVEIKHIMLPPSRRDFKDIYVVFELMDTDLHQVIKANDDLTREHHQFFLYQMLRALKYIHTANVYHRDLKPKNILANANCKLKICDFGLARVAFNDTPTTVFWTDYVATRWYRAPELCGSFFSKYSPAIDIWSIGCIFAEILTGKPLFPGKNVVHQLDLMTDLLGTPSLDTVSRIRNEKARRYLSSMRKKQPVPFTEKFPKADPAALKLLQG

SEQ ID NO: 70567 - protein, 98 aa, Zea Mays
MLEKYRNYDFGRCPRVYCCGQPCLPVGQSDIHRSSTVKIYCPKCEDIYYPRSKYQDIDGAYFGTTFPHLFLMTYEHLKLQKPLQRYVPRVFGFKLHKP

SEQ ID NO: 70568 - protein, 993 aa, Zea Mays
MRRGKGARNGLLPSSLRIISSCLKTVTSNAGSVASSVRSAGASVAASISSQAEDEKDQVLWAGFDKLELHPSSFKHVLLVGYSNGFQVLDVEDAANVCELVSKHDGPVTFLQMQPTPVGSEGIEGFRASHPMLLVVAGDETNGLGAIQGGRLSALIRDTNSEHQAVNCISTPTVVRFYSLKSHTYVHVLRFRSAVYLVRCSPRIVAVALAAQIYCFDAVTLENKLSVLSYPLQGAPGVNIGYGPMAVGPRWLAYATNTPLLSNTGRLSPQNLTPSPGVSPSTSPSSGSLVARYAMESSKQLASGIIDMGYTFSKYCQELLPDGSNSPLSSSPGRRSGKILSSVHPLEADNAGMVVIKDFTSKIVVSQFKAHTSPISALCFDPSGTLLVTTSVHGHNINVFRIMPTCIANGSGATRYDWTASHVHLYKLYRGMTSAVIQDISFSHFSQWISIVSSRGTCHIFTLSPFGGDASLQPQNSHSDGPPLAPCQSRPWWSKPSFLMDQQLHQVPSTVTHSVVSRIKNNTSGWLNNVSNVAASASGKLSVPSGAVTAVFHNSIYQGSLPVPSKANALEHLLVYSPSGHVIQHELLPSSGSESSGSSPRVGSGPNLQLQDDEMHVTAEPIQWWDVCRRTNWPERDENIANIVLYNQRSSMMAMGASDCEDSEHSDSTASNDGISGKEIMRIRERSSWYLSNAEVQINSWRIPIWQKSKICFYVMGYPAAELVESVSSGGGEIEIEKLPLHEVEIRRRELLPVFKQFQYSDRHSSDRNIANGGFQNALSHISNAQNSSVKDNGEYETKPVALSGFYADTRKTANTNGLARQTFSAVNLQQVGKCNSIESLNTAIVSGKTENGNNGYISTPPETKASIRSLSSYSLLDGHVDGMLSPNSASHKPETTNNSVLSNAASTDVQNGCLTTVDSGQQEASHSHSSVEFTQYFQEGYCKISELDDCRELTEAVTDADSSSSHCEREKPEEDGDNDDLLGGVFAFSEEG

SEQ ID NO: 70569 - protein, 198 aa, Zea Mays
MKQAAAAAAAAQQALLLQQQSQPPLFPVHHPHPGLLAAPQIEPIVSGNLPPGFDSSTCRSVYVCNIHLQVTDAVLQEVFQSIGPVEGCKLIRKEKSSFGFIDYHDRRYAALAILSLNGRQLYGQPIKVNWAYTSTPREGTSGHFNIFVGDLCPEVTDATLFAFFSGYSTCSDASVMWDQKTGRSRGFGFVSFRNQQIR

SEQ ID NO: 70570 - protein, 146 aa, Zea Mays
MYPLAFGFFQSETVESWIWFMSQLKKAVGGLGVLAVCSDAQKGLMHAVTHCFLYAKKRECFRHLMGNYVKSYSGSEHMYPAARAYRREVFEHHVSQVRSVPKIAEYLDQHHKFLWYRSGFDPSIKCDYITNNMAEVFNNWVKDHKD

SEQ ID NO: 70571 - protein, 268 aa, Zea Mays
MASSSPPRAWHSRLATFLVTLGFVEAKSDTSLFVHHHEAEIAYLLLYVDDIVLTASSQSLLRRLVDALQREFPVKDLCVLHHFLGVTAEPRPSGLLHQRQYTLDILERAKMINCKPCSTPVDKQAKLSEAMGDPVEDPIGYRSLAGALQYLTFTRPDISYAVQQVCLHMHDPREPHLAALKRLLCYLRGTVDYELLLHRSTSSELVVYTDADWAGCPDTRRSTSGYAVFLGGNLVSWSSKRQLVVSRSSVAAEYRAVVNDVAEAAWLR

SEQ ID NO: 70572 - protein, 270 aa, Zea Mays
MSATMAWYPLPQSGGTGTPSGGGELLDDQSGGWALWSFGSADDDHGAGVVRAETHGSSDERTEEGRPAPPQQQQQATDDIFMSQFSDEEVRKMDDAPFEALGMFPDSMHQLLSYENMLSGGALLSCCSSEDLLLNATLGVDAMDTCGFPLFSHDLQLQSAAPDLTLTPEDQVLVCASDVWCCSRLDHARHCSDEPSPGCSFRWCQDGASFAATKRSRSSVADEGGFLFQALVLRELEDVVFQAGREFECQVRRCERNAAAFLCNCNCNRR

SEQ ID NO: 70573 - protein, 942 aa, Zea Mays
MASKVRFTVGSQVWVEDAEVAWIDGLVEEVQGDELIINCTSGKKVTANVSSVYPKDAEAKRCGVEDMTRLAYLNEPGVLQNLKSRYGMNEIYTYTGNILIAVNPFQRLPHLYNNHMMGIYKGAEFGELSPHPFAIADHAYRLMMNCGKSQAILVSGESGAGKTESTKSLMQYLAFMGGKAQSGGRSVQQQVLESNPVLEAFGNAKTVRNNNSSRFGKFVEIQFDKNGKISGAAIRTYLLERSRVCQISDPERNYHCFYMLCNAPAEDRERYKLGDAASFHYLNQSSCIKLDAMDDASEYIITRRAMDIVGISSDEQDAIFRVVAAILHLGNVEFSEGSEADSSVPKDDKSQFHLRTAAELFMCDEKALEESLCKRVMVTRGESIVKNLDARAAALSRDALARIVYSRLFDWLVTKINTSIGQDLSSKLLIGVLDIYGFESFKTNSFEQFCINLTNEKLQQHFNQHVFKMEQEEYTKEEIDWSYIQFVDNQEILDLIEKKPGGIIALLDETCMLRNSTHEIFAEKLYQKFKGNLHFSRPKFSRSDFTIHHYAGNVTYQTDLFLDKNIDYAVNEHQVLLHASRCSFVSSLFPHEVSAKSTKFTSIGSSFKQQLQALLETLSATEPHYIRCIKPNNVLKPAIFENSNVLQQLRCGGVLEAIRISCLGYPTRRRFDEFVDRFGVLLPEVLGESYDEVTATNMLLDKVNLTGYQIGKTKVFLRAGQMAELDAMRTEVLGCSASKIQRKVRSYLARKKFIQLRISATHLQAICRGQIARHYYDDLRREAASLTIQTCYRMYFARKNYINLCTASTTIQSGLRGMAARKKLQFRQHTKAAVTIQSFWRSYVARSRFMSLKKAAIATQCAWRGRVARKELRKLKMAAKETGALQAAKNKLEKQVEELTWRLQLEKRMREYNMLISTDDQEVIWEIRYISQPENHVNREIR

SEQ ID NO: 70574 - protein, 273 aa, Zea Mays
MLLARIAGTRAVSSNPHSRRICRAKPVRQELPTAVDELPPAGHQARALHIRGAEVHRPAPRHRRQQVVHDRGAAPWPDGQRDQELLEHAPQEAAASDGPRRAPARPGRRLPLRAPHGAVGNGQARGGGAPLPPRHRRLLLLLRRHRGHLRLILLLHRGLEDRMRQARGHLPAPVELGHRGLLPPQDGRGARGQEEGRGDQAGVAGAAAGSRGRLLGRVQRDGGGGGAGGVPDVPRLRRRRAGAVSRPARRLLAVPAARRARRGVPGHGVQVKT

SEQ ID NO: 70575 - protein, 196 aa, Zea Mays
MDPLFPQSPVGFIREKSNIIFRQLLRTRRPFVAEITDAMGNEIFKVRRPFWWINSSIYVEVNDKEIGVVHRRWHLWRRIYDLYLGNMQFAVVENPGFWNWTFNLVDEDDKMLAQIDRNWRGLGFELFTDAGQYAIRFGDEGQSHKFAPAEDVEELHVVRQLTLPERAVALALAISLDSDYFSRRGGWGLPFLIATE

SEQ ID NO: 70576 - protein, 188 aa, Zea Mays
MAILAVASPFKTLNPSPPDHSRTRRRLPSSILHLPLPVPRCRRLRCSAKYSEAAAPSASTTTPRPSEIPWSKDICNSVRLIGTVGTDVELRQLPSGSAVARGRLAVWKSATETTWVTLQFWDDMAIVSSEHVKKGDRIFVAGRLVSDTVDEGPEKRHVYYKLAVQQLNFIESQPVRLYESDASQDAPE

SEQ ID NO: 70577 - protein, 192 aa, Zea Mays
MASKYVARVPSPWWAPQRRLVGSWVSVCSVKCGALGGRDVVCAAVSFRPCIDIHKGKVKQIVGSTLRDSSNDGMELVTNFESDKSPAEFAKSYKEDELLGGHVIMLGSDPASQAAALEALHAYPGGLQVGGGINLQNAMSYLNEGASHVIVTSYVLSDGKMNIERLTKLVELVGKQRLVLDLSCRKKIYYCN

SEQ ID NO: 70578 - protein, 209 aa, Zea Mays
MVGDGVNDSPALAAADVGMAIGAGTNVAIDAADIVLMKSSLEDIITAIDLSHKTLSRIRLNYMWALGYNVLGMPIAAGVLFPFTGVVCSSSSTRNRCTLKTCPGPGRTQIWCDCEPSTRTKIFLENHIVDSEISLTATVNLIWILSITSLLFLLMQALKRIKLYELKYKDISKVEKDIVLRPSMAPRCTSSASPRPSASVAHLETLQDH

SEQ ID NO: 70579 - protein, 67 aa, Zea Mays
MDPPRAVAFLLILLPVLAPVASGVPFVVLHGIGDECGNDGLSSFTKMLGEWSGSKGYCIRKNQKRRM

SEQ ID NO: 70580 - protein, 384 aa, Zea Mays
MKARGFKGIALGTLIMLYAQKSLRTLDTHGREKQKMEPRQEHEKRVVLETIVTLLPKERNSMSVSFLSMLLRAALCLDTTLACRLDLEKRMAAQLGQAVLDDLLIPIFLPDAGNTFDVDAVQRILVGYLEHEAEADRLDYNTDDDFTSTASPPNDVGMVGKLMESYLAEIASDVDLPVDKFTGLAEMIPERARFNDDGMYRSIDIYLKAHPYLSEAERKTVCRVMDCQKLSREACAHAAQNNRLPVQTVVQVLHHEQRRLREAPTSSFYGGESPTPAPSLQGRHGRSVPDEMSQLQRENEELKMELLRLKMNLRDPSAPPQHSDAPPSGRRPLPKKAAGGSGGFINNVSKKLGRLNPFLRPDAVGGAKVRTKPSRTKDRRHSIG

SEQ ID NO: 70581 - protein, 72 aa, Zea Mays
MYCTHPLCEKLPLHAETIQDLGCQGARRLLHQEISVATSAMFLGPHVGAQHSCTCPPLAIKGEACNVTRRLT

SEQ ID NO: 70582 - protein, 179 aa, Zea Mays
MYPDDAGAEPCMLSSFILRELSGEDLKVKTVPLPQRNSMFSSRPKYKKKSSTYNTTTPFHSLQAEKLREKLRQECLRKGTELAHGVADALFAVPPTEDLDGPIVHLPLPVVRLPREKHLGAGTSLPRLVAAKVGADVTLTDIAQNAEEIIQHLKHSCPAHLYATSMSPPAVQQENIKIA

SEQ ID NO: 70583 - protein, 324 aa, Zea Mays
MARRLLAAVAIVVVAAALACGAGAQLSAGFYSSSCPAVHSIVRQAMSQAVTNNTRSAAAVLRVFFHDCFVNGCDASLLLDDTPTTPGEKGAGPNAGGSTVGFDLIDTIKAQVEAACPATVSCADILALTARDGVNLVSLGGPSWAVPLGRRDATFPNSTGAATDLPGPDSDLAGLVAGFAAKGLSPRDLAALSGAHTVGMARCASFRTRVYCDDNVSPAFAAQQRQACPSADADDALAPLDSLTPDQFDNGYYRSLMAGAGLLHSDQELFSNGALDSLVRLYGTNADAFSSDFAASMVKLGNIGPLTGSAGEVRLNCRTVNSNS

SEQ ID NO: 70584 - protein, 922 aa, Zea Mays
MASGGGGIRATTSGRMKSRGWGDSSDDFGTPAIALRRGGDCSGTASSDSSAVFFAVAFCAPSPGLSVTAAAAMVEMRQRRKPLVLASTQALLDSLPGDRPPPPPQKPVRLKAGVLRFPSGGGGAEFGELASFVGIPAPALRRLAVVTGTPVLVKNTDNNVGRIVKAVLFGNPSLDKSCSEHTDQVVSASLSGHAMGFLPCRTFPAIGFTSMDEDVGYVSPLLAFNLGLHVSCLKLLIQREGQPFKFCSRAEEIDATASSGSDLSLHLDLLPCPQVPKYALHLRVSVVRIPDCGVLASLKIYSSFGGSEYQDMVDQALNEYFKFDRFLARGDVFGIQNSWKCGSSCCLACNKQDNKLNPRNMIYFKVTGMEPSDEPILRVNCNETALVLGGAASAAIPPYSFFASSGNSVPLHSEVVEHLASVIAPALCPSDILPKIKFSTFLYGPPGCGKRTVVRHVANHLGLHVVECSCHDLMTSSESGAPAALATAFKEAQKYSPCIILLRHFDAIGNASSNEGPQSEQSGIASNIESVIKQYIGQRWVAKDSLPGKDVNGSSYLVEPECVSSLQIILVATADSSEGMQQSIRRCFRYEIDMKTMNEEQRNELISETLQGIPKVADESICDKFIKDLAAQTSGFMPRDILALVADAGVSFAHKIAAGKDSKAISKHTEVLPESSSATQNEEHHFSKEDIMSSLERAKKRNRAALGTPKVPNVKWEDVGGLEDVKKVILDTIQLPLMYKHLFSSKLRKRSGVLLYGPPGTGKLLVEIDGLSDNSQDLFIIGATNRPDLLDSALLRPGRFDKLLYVGVNTEASYRERILKAQTRKYKLHKNVSLLSVAQRCPPNFTGADIYALCADAWFHAAKRSVETFEIDPSRSNEASAEEVIVEIDDFITVLGDIAPSLSLDELQNYEQLRQKIEGPSR

SEQ ID NO: 70585 - protein, 577 aa, Zea Mays
MDCLQKGCGLVFLKMTMKHSTSGTMRLVCQRSGYRGWVQKITFGLVAQLDLVDLALKFIMISILREDHQMCCLQDLGDDSRFIEFYNLVFMQYNKKDDGSLEPLKQMNIDTGMGLERMARILQKVPNNYETDLIFPIIEKAASMAMVSYAKADDATKTNLKIIGDHMRAVVYLISDGVIPSNIGRGYVVRRLIRRVVRMGRLIGIRGDGHGNSEGAFLPSLAEVVISLSTEIDSDVESRRRSILGELQREEMRFVQTLERGEKLLAELLDEALLNAGNNGNKPSLSGKNVFLLYDTYGFPVEITAEIASEQGVTVDIEGFDIEMENQRKQSQAAHNVVRLSVGNETEIVKNIPDTEFLGYDSLSASAVIKGLLVNGNPVNEVSQGSEVEILLDRTPFYAESGGQVGDNGFLYVNGGEDRRQTTVIEINDVQKSLGNIFVHKGMIKQGSVEVGKEVDASVDAKLRQGAKAHHTATHLLQSALKSVVGSETSQAGSLVAFDHLRFDFNFHRPLSEEELTTIEALINQWIGNAAHVETKVMALQDAKNAGAIAMFGEKYGEQSRRGSRDLIGTLWWDSRQ

SEQ ID NO: 70586 - protein, 344 aa, Zea Mays
MAGGCLGSGALVTGTDSLLANQSPAQFISPCDIWLLVTSDIFCSHVLKTYIWLQCFDGSIQQVEEEVAMFCPMICQEIVKNGTGSSKNHAIALPERVNPANLSLILDYCRFHQITGRSNMERKSFDEKFVRIETERLCELTSAADSLQLKPLVDLTGRALARIIEGKTPEEIRDIFHLPDDLTEEEKLEPLKNINDGPARIRLLNRLYAKKRKELQERHKLKDVQVQKEQKDERSLDELLSFINGDGGSGGRKATKSKKKNKRKDHVENPPKADSEPVNANPDMQDDAEYPFEDADLDDGLDPAMKEELDREVEAFAKRLDSVWKESHIGGNGSARRFPGFNHM

SEQ ID NO: 70587 - protein, 75 aa, Zea Mays
MTYVALNPCICQVATGFLKTRPGSRQPRAQIHHRPASCHRGYTLLSASLHSHCVLAFLVLVCPSQSLPMMRHVTS

SEQ ID NO: 70588 - protein, 170 aa, Zea Mays
MAKPLNGSGRSMPRSNEGMRLIFSAVVGVMLGYLFGISFPTVNITKLHFPSSIISYIEDRNSGITTQTLLNHAWASANNHKKNSSESNTDEIPEIYVPTNPKGAERLPPGIVVSETDLYPRRLWGDPSEDLTSEPRYLVTFTVGIGQKANIDAAVRKSGMNLSGLKEQSM

SEQ ID NO: 70589 - protein, 576 aa, Zea Mays
MSGHLDRFARPCFEGCSSHDERRDHKSDFEVSEDEKKTRISSLKKKAIDASTKIRHSLKKTRRKSGSRVLSVSIEDVRDLEELQAVEAFRQALLLDELLPARHDDYHMMLRFLKARKFDIDKAKQMWIDMLQWRREYGTDTIVEDFEYTELSTVLQYYPHGYHGVDKEGRPVYIERLGKVDPSKLMNVTTMDRYVRYHVKEFERSFLIKFPACSLAAKRHIDSSTTILDVHGVGLKNFSKTARELIQRLQKIDNDNYPETLYQMFIVNAGPGFRLLWNTVKSFLDPKTTAKIHIVQSGGVHCARQIVTISNGEEKFITYAKPKRHAMRGSDTSTAESGSEADDAVSPKALRSYISHPKLTPVREEVKMVRATSFSTRVPEYDVPVVDKAVDATWKREQPRKAPSVPQDADSSVKTASKPSGRPWDKIAANLMACLMAIVMLVRSIKDLATMRLSSKGGSEESYCTLYPDSVQKEEFRPPSPFPGFAEADLFAVVLQRLGELEEKVQMLQEKPSEMPCEKEELLNAAVRRVDALEAELIVTKKALHEALIRQEELLANIDSKEIARAQRKKKTMFCY

SEQ ID NO: 70590 - protein, 87 aa, Zea Mays
MIFTKCSTTARTSCRASFSSTPSREDTLVLATRHQLNKRNPKDNWSRIEIVYIARQTCVINDVNRKSTSCFRLSHRISQGKQICYSY

SEQ ID NO: 70591 - protein, 232 aa, Zea Mays
MYKLKAAIQGLAGSRSAAAEVYGGEYQFQRAVENLCEPRFPNPLTRAHRCGFLCCFPPSRALLLHGAMAGSGNRRFGRDMVSSSTHFSQWQMVWVGDHVPGGRVDLQCGGPIWPPMSARSGANSDSLAVTTFRCSFRCSDDLSLHPWISRQLGTRHQNEGNQESKRPRESQSTRRGTRELGIVKRARGDELLRFMDGASKEPLRKVNTNTRFLFNPRSFPEIWCYNPCSFDS

SEQ ID NO: 70592 - protein, 100 aa, Zea Mays
MHKPRIAPRFSGPKTTGGSPIDLRLPPPMPCRCGRAAAVLSLGPRARHHRAPARLRLPMEARAGLAGVRTSRDLVTGDEAYRVRSHVPRARTVNCRRTIS

SEQ ID NO: 70593 - protein, 163 aa, Zea Mays
MPLPPLLPRLYPTPPPLRAGDRGNAVPLSPGRRRPALLAVVRAKRKDEASFTDRILDYIEGGPKLRRWYGAPDLLPKDGAAEDEEDESQDIEESRDAVLVTNGDSEIGQMVILALILKRARTKALVKDKRTTEEAFGTYVEDGFFSEPIDLKGVQHIVLLSQK

SEQ ID NO: 70594 - protein, 394 aa, Zea Mays
MDTSSSSDHRRKRRKGSKKDKRKPTKRKGKHTRSKRKSRGSKRRSRRSHGSSSDDSVSSKTDNSSSDSEKGGHHTKRSLPKADKESTKMTISEQGRTFQEADKDEQTVTTINRSQSHDGSKPSNKDGNRADERSGNYNSEDRNGPGGSSRNNPIQVDVNLTKPVNVDGNTGGDNAEAGMSRTGEGRHLPSNDSVSTNGKDLGVGSADNGQPQRIRKGRGFTQKYGYARRYRTPSPERPPVRPRYDGGRDDRWNNFNRYERNGPYSRRSPVRRYHGSPRANSPSRYPRRERMRSRSRSPVRRHDRGGYHRPSPRRSRSPAEPRQNVNDRPRSGHGGGDPDHSPPANRSRSKSRDPLGPRSPDAAPAKRESSRYNRRRSSSSRSSSPDGNKGLVSY

SEQ ID NO: 70595 - protein, 178 aa, Zea Mays
MDAASIAAAAAAVATPPPGPAVTVQVPRGQVDLIDFIDWTGVECLNQDSSHSIVNALKQSLRDDEGLYLASDSDEQLLIYIPFMQVVKLHSVLFKGPEEEGPKTVKLFSNKEHMGFSNVNDYPPMDTLELSSDHLIENKPLPLKYVKFQNVRRTINLEVMSRKFKRLLFMAQLWTRQI

SEQ ID NO: 70596 - protein, 612 aa, Zea Mays
MIIVNRAANAAWHMGEWDHMADYVSRLDDADENKLRMLGNATASGDGSSNGAFFRAVLLVRYKKYDDARMYVERARRCLATELAALVLESYERAYNNMVRVQQLSELEEVIDYCTLPMESPIADGRRELIRNMWNERIKGTKRNVEVWQALLAVRELVLPPNEDRDTWIKFAELCWKNGRISQARSTLVKLLQFDPESSPELTLYHAHPQVALAYLKYQYAVGDELKRRDAFSKLQELSVQVATTMGNLPGTSANHGTMSNAGVPLIARVYLTLGSWKKALSPALDDDSIQEILISYHNATLSAKDWGKAWHIWALFNTEVMSRYTFRGRPDIAGKYVVAAVTGYFYSIACASTTKGVDDSLQDILRLLTLWFNHGDTSEVQTALQKGFSLVKIEMWLVVLPQIIARIHSNNRVVRELIQSLLVRIGKGHPQALMYPLLVACKSISILRQRAAQEVVDKIRQHSGGLVDQAQLVSKELIRVAILWHEMWHEALEEASRMYFGEHNIEGMLAVLEPLHAMLERGDETIKENAFIQAYGHELLEAHECCLKYRATGEDAELTKAWDLYYHVFRRIDKQLPSLTTLDLHSVSPELLKCRKLELAVPGTYAAGQES

SEQ ID NO: 70597 - protein, 91 aa, Zea Mays
MSYPHADDPLVHQDGAVAVRDVICPVGLRPNHWSGLGGGSGGSRVHGGFVSGVTMGDPSVCTDEFFTVTVGPPCVAVGARHHSDHGRKLFI

SEQ ID NO: 70598 - protein, 408 aa, Zea Mays
MADWNRPWDVNAHCDRSGSDRRPPLPRPDSRDNYYPVPLWERKFCRNAYGIPWKKFCEKKQFIELYKNVMDWDDSGALENFEAAKERFRAKYHGEPFEDPLLDPDMYIDEIDHLCEVDPELVADLDKVPDVDKVLEQQLVANLGCEEPVADLVPMGHGELGAIPTPTGWGEEDAIPTPTGWGEEDANLAPVGWGEPVANVAAIGWGESASLTPDTAWEGRNSGWNSPLDQPQCTPSNWNDNSYGDRSSNNWYQQEVDPSHMPFGTRRNLNGGGRGSSCRNSNGGVGNRNNNLYGGRSSNTRYQQEVDPGRNSSGTRRKLNGGSGNRNNNFYGGGSSNNRYQQEVDPGRMSPGAGRKQNGGGRGCGRSGSKWNGGGGSGWQQGQRGRRTREMEWRPVQHKRDPQDDPAA

SEQ ID NO: 70599 - protein, 258 aa, Zea Mays
MPSRSPRQSARPPLPTAAEPPPGLFPAREDLVRLLAVIFIAAAAAAACSVLNRRPEPFCDSPQWPDDYADDSCQPCPPNGRCVDGELECVQGFKRHGKACIEDGLLIQRANKISQLLQLRICDQHARALCGHSAEILFQEHEVSNAIDELLSKIPAGLTEDGLQLVKTRVLESAGGFFDTTFTSSKVKVYKCPELVAELHMPMGCRVRQWIFRNTTSVAIFCILHCFGYCGSFTRGGHYLIELSKYTSRYVKSLKIML

SEQ ID NO: 70600 - protein, 373 aa, Zea Mays
MQSTAAMRSGGGGNKRSLLLLLSAWWLLLGSLVAQLPAARGGSGHVVTRMPGFDGPLPFHLETGYVEVDEQLGVQLFYYFVRSEKDDPGEDPLLLWLSGGPGCSGLSGLAYEIGPFHFDARGYRGGFPTLLYRPETWTKVSNIIFMDSPVGTGFSYATSDEGLKSSDTQAVRQLAIFLRKWLEEHPEFLPNPLYIGGDSYGGMIVPALALQIHTSTELGENPSFNLKGYVTGNPVTDSQFDTDGVVPFLHGMGLIPYEFYENAREMCGGKYSDAASVACAEVTRAIANITSAVNREHVLEPACPDDDDDELFGPKTTMAETDGGTSRRLMLQSADYFLPAGFKCRRASYVLSRVWANDETVQESLGVRKRLFV

SEQ ID NO: 70601 - protein, 655 aa, Zea Mays
MYLGMILDVQVALKCSYIETTGCLGQFLALGAKASSWCRKHIVCSIESVDDSEDVQQEEHSKILPEIILMALNISIKILPSAAKCVTVDMVHNIGDFISELLSLMESSIVDNDKKIHGAALDITKAAPVFLDETTKLCRAYSEATKVDNCTMSITDEDATVKHNKQGLASDVIRITSSTIQTMCRLGTYAASSGGSQVILLNVSWKGVVSLLQSGKGMIEGKVNVREIIVTLLSLSIESLRVAAETWCAPLLETLGATEARRAFLPIKFFLINAVRICSTYPSEAMIIYKNIINCAVVITSSSILFSKKPQLKAANETLVELLEPTLFVLLDTLMKSSDLTPESKCQLAHHFFENEEDKSPDLMGQANQREINLASLDCIFSMDSDVDHRNRALLPAELLVFLHFLNASSWLTEMVVITLSKKLQTLLNILTSEDIYSYVLGFQIPALNGADQSPAVVWQPVYTSIIQALKAFMISTVASSAAWNELEAFLLENIFHPHFLCLEIITELWCFFIRYAETETSINLVNQVSLLLKTVASPEDVLSPLSALRKVARSLCIILSYASSATVDQIYTCVLNGENSSKSSILHLALLMEGFPLDSLSDGTKELAMKKMFTSFAGYLESYSKNHRVINVPTCKLGVVGLPIHALASALQHR

SEQ ID NO: 70602 - protein, 236 aa, Zea Mays
MDPRFTLPAAIGGGAGRVHHRRAHSESFLCFSDADLLLDPDGDLSFSDLDFPSLSDDSPAASDPTPPPPLPQPAPAPRPAGGAHTRSLSLDAAFFEGLAFQGPSGSAGGGPGHKRSGSMDGATSPFEGESALSSGLPDYAKKAMPAERIAELALIDPKRAKRQSAARSKERKVKYTSELEKKVQTLQTEATTLSAQLTLLQRDTTGLTAENRELKLRLQSMEEQAKLRDGMICSFL

SEQ ID NO: 70603 - protein, 147 aa, Zea Mays
MEYSNLQQQAASLKKNLFDQGYLDEQFCQIEDLQDEASPNFTEEVVSLFFKNSTRLMTNIEQAMDRNPRDFCRWDVNMQQLKGTCSRMKNECTSFRNRCGDENVEGCMRSFQNLKREHGVLRQKLESYFQLLRQAGPAVTATRPRGM

SEQ ID NO: 70604 - protein, 53 aa, Zea Mays
MGPAPRARRQPSRAVCSVPACAVQASLLPAVPSGPARRQQEGAWFWTQHSRVL

SEQ ID NO: 70605 - protein, 100 aa, Zea Mays
MTTRHDKLEHGTTSWNRDASTWGWIRRGSSTRTNFCFIALHTTRDAGDTTWCPSRTRAIHLGRGELERRDERRGAAQARANSRREEEAGEGRSTARRRRG

SEQ ID NO: 70606 - protein, 592 aa, Zea Mays
MINEGKSNSVLVSGESGAGKTETTKLLMRYLAFLGGRSGTGERTVEQQVLESNPVLEAFGNAKTVRNNNSSRFGKFVEIQFDKSGKISGAAIRTYLLERSRVCQINSPERNYHCFYFLCAAPSEDLKKYKLGDPSSFHYLNQSACIQVDGINDAEEYLATRNAMDTVGITDQEQEAIFRVVAAVLHLGNINFAKGREVDSSIIKDDKSRFHLKTAGELLMCDCEKLENALIKREINTPEGVITTTVGPNSATISRDGLAKQIYSRLFEWLVNRINASIGQDPDSNKLIGVLDIYGFESFKTNSFEQLCINFTNEKLQQHFNQNVFKMEQEEYTREQINWSYIEFVDNQDVLDLIEKKPGGIIALLDEACMFPKSTHETLSQKLYEKFKTHKRFTKPKLSRTAFTIQHYAGDVTYQSDQFLDKNKDYVVAEHQELLNGSKCSFVSGLFPPATEENTKSSKSSIATRFKMQLHELMETLSSTEPHYIRCIKPNSVLKPGIFENTNVLQQLRCSGVLEAIRISCAGYPTRKQFHDFLHRFCVLAPEILKEKNDEKVSCQKILDKMGLQGYQVKNTSLTNLLNMYWKRVFRFPNWW

SEQ ID NO: 70607 - protein, 84 aa, Zea Mays
MAPKLCSAPIPARVPAPLVAAPHCAELLTVVQLAGFSCRAPSTDLLPHPVSLRNQAIAPAPFIPSAPADARAQLRSPQTWWSRP

SEQ ID NO: 70608 - protein, 433 aa, Zea Mays
MRNFNLMQSQKSRVLGAMSSSLPILPNPLKGSFSRPHNPQHIPMLRQLPDDSMPLCIDTHQSASLHPRAGVIGVPYSGYTASPLDSVSNLDSQTMAAPFISQSSNFEALQSLSNNTPETHTKAAWFTSSMDVSPLNTDNIAASDVNQIQSIRPAMTSDESATQNDWWADIMNDDWKDILDATATDSHSKSASSHSREICPVASPPNSSNASVAKQRMRWTPELHECFVDAVNQLGGSEKATPKGVLKLMKVDGLTIYHVKSHLQKYRTARYKPDLSEGTSEKRTATEELVLDLKTSMDLTEALRLQMEVQKRLHEQLEIQRKLQLRIEEQGKYLQMMFEKQSQSSTEKVQDPSSRDTTAKPSSNQSQSTNKDCGATMDPNGTGGIVRTAELGERSSELGVKQKLVEIEESGTEVATGDRSKISQEKRRKLQDS

SEQ ID NO: 70609 - protein, 149 aa, Zea Mays
MKYLNKKKAAEEMIQHYEKQSSVDYSLKEGETLVLQLKNETGTKTKSTFFEQGLNKLSVNEKTSAKEAPVSLKLPPPPPSPVSPTDSGVAASPFKAEFPSQEQPPAEPVSRTSALPSKGEPAPELPAAAEKMKEQESVDEDFGDFQAAG

SEQ ID NO: 70610 - protein, 830 aa, Zea Mays
MDARDWVYEGGPHRVQKNCALPTARMMMGVRLLRLCGDLGRPRKCRGWSLAGGRRWQPRTPRGSTDDHRGGPHRSWRCACNHLHARCRRAITDVVGVDEAGFAGGQNHVDWEPKVPARGGRSQVVAVAVTRAKTWLAVAVYKDPGKETKKKDSEQGDIKKCTSPVRCYFICTKSGWRGDEAYIPIDKCRKLFMHIHTAPTIANYMKRFHLILSKTLTLDVDLSTIDVILIDDEPCRDEHGNIVMLDGKRLIHTDGTGFISENLAKKCPSRIIKGKKSKVYMHQGETTVRLFYNGYAVKGTLLVDKRISNNTIVIRPSMVKVKADPKLCRMKSLSSLEIVSTSHQSNRTSTSRILIALLHYGGVKAEYFMELLHNAIEGVNNARYSFRHALKLAYGYANMEDSMLERMIHSGIPLEEPYLLSRLSFMAKQEMKVFREGKLPIDECYYLMGTTDPTGTLKPNEVCVILDSGQYSGDVLVFKHPGLHFGDIHILTARQIDGLEKNFIGYSKNAILFPTSGQRSLADEMANSDFDGDEFWVSRNNMLLKTFEKRSEPWVELLKLKETQHRLSKPGDLNELILERVLFNECLTTMFIPNYTKGLAPDCWLAHMDRLLTEGVDQDEKKSIVENMIKLVDLYYAALDGHKVDVDRHLRVKAYPHFMEKKGFESYHSSSILGRIYDETEEIIAQQCDEQIQITTLPCFSEVEATPECTSLWEHRYQEYLTKSRGLFDLGKEEKNDEFQKLYQHYKHLLYDADELEETSRDLSDVFMEACAIYRIVYERAWCTRSVSRCRFVWNVAGAALCHLHATKYAAQRGEKTALCPLSVIRQLYI

SEQ ID NO: 70611 - protein, 308 aa, Zea Mays
MAGDPPTAAEKETLVSSFLEIAAGQTPETATQFLLMTSWHLEEALQLFYIDGESALTPAHPVAPPPTSAAASALAAAAGAEEAMRFAPPPAAALGDAMLHGFGVGEDDDVRAPLPVKRETLYGEGIVSVMRPNASAAFRNFEQEARQSAVWDSDQNATSSSGDNLASLYRPPFSLMFNGPFDKAKLEASSLDKWLLINLQSTAEFSSHMLNRDTWGNDAVAQLIRSNFIFWQVYYDTSEGRKVCTYYHLVSMPAILLIDPVTGQKMHAWNGMVHPDRLLEVRRSTMQLNLKSAQGKLIRKLLRASKAK

SEQ ID NO: 70612 - protein, 161 aa, Zea Mays
MEKARRRHVPAFGEWNYYYSSSSSTSPDSAPAAAEPCWWYAPEPEARSEAWFRYSPPPRRRPAPVPASKKARRPETAGGGGGAVAAAVAAERKRAAAPKGSGRRVVVVRPVDEDLYRVPPPDDNDGAAAVSRLPRRRVRTSVRRGGACGWVAWASTAWPEA

SEQ ID NO: 70613 - protein, 56 aa, Zea Mays
MGQNKALAQSSLRLNSQGGKISVENYTFDPEVARRELASMITLHEYPLSIVDHTGF

SEQ ID NO: 70614 - protein, 851 aa, Zea Mays
MTIWLSAVEFALLKGRHPLIKDVDITINPSKGLAFVEPQVNQRKSPKGNSFRQHSELILYNNVAHGINGLLVDSANKYSGAQNKENGQLNNNGDIGTVDKDLEEELEESSEDVEKGQALQSASLVMNMLDATMPGTLNDDQKKKVLVAVEQGETLVKALEEAVPEDVRGKLTASVTEILHSKRETFSLGALNRLGWNNVRPTTTKTLAQEKLKDSDHESGLKDTKMVDQNRISATAFEGDLKDINMTNDDKPGESIESSQGKPSQTSEPVGTATEIGTEQPYKSDKANYGTNDSSEGQHITEQDNEMTPKQVSDDQSVANCNGPSKEREQSADATTDQNLQSNTTTEKEGDTSRTGEDKTAHNVNDQSTQVSKTEESKPSPITVTQALDALTGFDDSTQMAVNSVFGVLENMIDQFEKQQDSENGESADGNDGITSVDETESHVKENTENVSSGEDINHSSKQPEGSSPGKTDSIMSKYDCAFGEENPNLSIVSYGRGKMRYYRGNKVGDHVGADGIERVSGLPDYLLDIAVNSYLKAQYAMYLREFLYTELQLKSPESNSATDLFLDPQEGKWKIEEQMGNVQNDNFESSQESSKMDNAIEPPYFIPGKNPDIAYKSNKWNNTVATRSKPGNDLNEALTHFVRDELSSALKIEVGRKIGITDTKQLERSLANDVEQIAAEVSKTVVLDCELYSAIHVQRSPTTIKFGSTHGKNVVEAVSTAVQQSQHLRNILPVGVIVGVTLACLRNYFHVGVSKHGDHMIATMKSDIFGEEVIVQDSSKENVQDSGKANTNDNNIEKTSGENQQDMTKSQGQDMMVGAVTAALGGSSATLSRRGEQMGRRCSWSWWSSI

SEQ ID NO: 70615 - protein, 177 aa, Zea Mays
MGMTWDWETPWCGAGKELRLGTARAMGGRETSGRAGEGHRESSGVNPRQRCVEVEEKGCLVEKSSAREQQPVMERPRLGRAPGRAAMAGFLQKGRWRLELAAAERMKTRPDFSWLHKQMRTTADDRQEKTEGEIERLLQGLLAQKSEQGRRRDKARRRKKNQQRAYRKISPMSSACA

SEQ ID NO: 70616 - protein, 759 aa, Zea Mays
MVRSGSIRRSAVPAPMPAPAFTVSPADYRLLEEVGYGANAVVYRAEFIPTGRTVAVKCLDLDRVNSNLDDVRKETQTMSLIDHPNVIRSYCSFVVGHNLWVVMPFMSEGSCLHLMKVAYPDGFEEPIIASILKETLKALDYLHRQGHIHRDVKAGNILIDNPGVVKLGDFGVSACMFDRGDRQRARNTFVGTPCWMAPEVLQPGTGYNFKADIWSFGITALELAHGHAPFSKYPPMKVLLMTLQNAPPGLDYDRDKRFSKSFKEMVAMCLVKDQTKRPTAEKLLKHSFFKNAKPPELTVKNILTDLPPLWDRVKALQLKDAAQLALKRMPSSEQEALSMSEYQRGVSAWNFDIEDLKAQASLICDDDPPEIKEDDDTGRITDIDKDTSSDDYFGKTAPSNGNNCSDRSSVPANPGQNGPEINEILSSNNGNAYSERKPDGRKNPESENDSLPSTSKHDADGKDYRCDFRQKQRTYSGPVLQSGPNNSSMTERGHIIERDAGVQSVSDKQKNGTRRANNLSGPLSLPTRASANSLSRANNLSGPLSLPTRASANSLSAPIRSSAGYVGSLGDKPKRTMVEIKGRFSVTSENVDLAKVQEIPGSSASRKLQEGPSLRKSASVGDWSANDKTTSTNHQRKELCNSSVSTSILIPHLQNLVKQTAFQQDLITNLLSSLQQNERVDAAQSRVQSTTSDTVVEAATAEREHSLLVKIFELQSRMISLTDELIAAKLKHVQLQEELNVLYCQEEILDMREDESEEA

SEQ ID NO: 70617 - protein, 64 aa, Zea Mays
MGKNISLILSAPSTQYLCSSSSRSLLRGGRSRGRRKPWRGAAMGGEDSQPKGKEERGGQVWEGG

SEQ ID NO: 70618 - protein, 276 aa, Zea Mays
MQFDSTDSPLFINEQIHKNAQATTVLLASLCREEYNKVSGLDNAKQIWDTLKISHEGNDVTMLTKMELVEGELGRFAMIRGEEPTQTYNRLKTLINKIRSYESTRWTDHDVIRLMLRSFTVLDPHLVNNIRENPRYTKMSPEEVLGKFVSGRMMIKEARYVDDALNGPIHEPQVIALKASSSKEALPSKVAQVEAAGLNEEEMTLIIKCFKTALKGRKEHPKKNKTKGKRSCFKCGKIGHFIANCPDNDSDQEQDKKREKKKAYKKAKGEAHLGKE

SEQ ID NO: 70619 - protein, 456 aa, Zea Mays
MKGRLLLLLWAWAAATWVSVSAVTRLGRGVAGEQPLSRIAVERVVLAVNDAAYVKASPLVLGHKGENSEWADVEFFHPNPSDDDWIGVFSPANFRYTYRLGHRLMNGTRVWSKSYSFKASPYPGQDSLQRVVVFGDMGKAEADGSNEFSDFQPGSLNTTYQIIRDLEDIDMVVHIGDICYADGYLSQWDQFTAQIEPIASRVPYMIGLGNHERDWPGTGSFYGNLDSGGECGVPAQTVFYTPAENRAKFWYATDYGMFRFCIANTEEDWRPGTEQYKFIEQCLSSVDRQKQPWLIFLAHRVLGYSSCTYYESEGTFEEPMGREALQELWQKYKVDIAFYGHVHSYERTCPVYQSQCVVDGSDHYSGPFQATTHVVVGGAGASILDSEFTTSKIQWSHFTDFDHGFVKLTALNHSSLLFEYKKSRDGNVYDHFTISRDYRDILACSIDNCPRSTLAS

SEQ ID NO: 70620 - protein, 370 aa, Zea Mays
MDAKKPYMLAITTVAIYTGMYVVSKAAFNQGMNSFVFVFYRQAAASLLLLPIALVLERKNVRSMSSGLILKLFLLALIWNTLGMNLCNASVTLTSATVASATGNSTPVITFCLALLLRMEVVKLRSVSGIAKVTGVALCLAGALVIALYTGPSLSPVNRHHRASGGAHGFKAPTRGGTWVTGTFLMLLSNVTWSLWTVLQGALLKEYPNKLLVTTSQCLFSTAQSFVVAAVAERDFSKWALKLDVSLIAVAYTGFLVTGVSYYLQAWCVQIKGPVFLAVWNPLCFVLTIFCSSFFLGENVHLGSIVGGILLVCGLYSVLWGKTLEVHQTVESGDNTVGEVQNGQEEKNHQQKVLEKGRQEEASMTAPGVV

SEQ ID NO: 70621 - protein, 594 aa, Zea Mays
MVDMAGSCIIALPSRFAMATSYGFCIGYVPKWFNWGYHQEVEDEYGDEYYDQDEYEEEGSGAGDGYAEEEEPTEGQKEILELRERLKEQIRRKAKAAAACTAGRSSSSQIPQARDKFGSFFGPSKPVISRRVIEERKSLKELHSTVAREPRPSGVHKDIPSSSKVQSRVNGHQHKQKIVNQVKKKAEALKDNRDYSFLLSDDADLSSSPKEKPAARSSLTQRADREVTQSTVKRKAPTSQPARLSNGYGPKNTMSTQRHAEGKVNSMRREDFSNTERVVSRDNERMYERVVSRDNERMHSIARNGSNQASTSKTTIQKHPSRGPIANKQPSKDSNDATLRKSSVASKHHPLEIDRPKSSQSQRMQSAGQRPQHSSHGQTPHQSMQHRTQQSLQSRRPQQMTQGQKPQQSLQSQRTQQSLQNRRPQQSSHIQKSQSSQAHRPQSLSNRSQALQGQRPLSSQGQYPEQRRVHASDRVKQAERQIRPPSKSMPSRPVSSNGIRDDHAKRKQVAKRRFDEDDEDPLAMIRNMFGYDPSRYAGRDEDVSDMEADFATIEMEEKRSARIARQEDEEQLRLIEEEERREQERKRRKMARGR

SEQ ID NO: 70622 - protein, 171 aa, Zea Mays
MGTQGYAAPEYIMTGHLTAKSDVYGFGVVLLELLSGRKAVDKSRPPREQNLVEWARPYLTDARRLDRVMDPSLVGQYSSRAAHKAAAVAHQCVALNPKSRPHMSAVVEALEPLLALDDCLVGPFVYIAPPETTTANGDEAAPVSSNKEGSGRRGGRRRSSGEGAAVVRPEE

SEQ ID NO: 70623 - protein, 64 aa, Zea Mays
MRCAHPRLRQASPSRAPCCVSLLSLDAPCAESSLARFRMLHAGSLSGVNFIIVTQTSCPNVRLI

SEQ ID NO: 70624 - protein, 282 aa, Zea Mays
MHMTCTPPCKFEFCWLCLGAWSDHGERTGGFYACNRYESAKKEGVYDETDARRERAKNSLERYMHYYERWASNQTSRQKAQADLLKAEKDQIANLTDIFGIPETQLKFIIEAWSQIIECRRVLKWTYAYGYYLDDKIKSEFFEYLQGEAESGLERLHQCAEKDLQIFLPSVKSDSTETTTPTVAEFGEFRVKLAGLTSVTRNYFENLVQALEAGLEDVRATGQAAGTSSTATSSKKGGTKSKKKQHTAPSSDHTDDGWPCERCTFLNPPTVDACSVCEKSRY

SEQ ID NO: 70625 - protein, 755 aa, Zea Mays
MKVVSVHLAAAVAVLLLLAAKRTPAIAVPSPQCQRQCGGVDIAFPFGIGDNCSLSRGFNLSCQEVQNGVYRPFLGNIEVLNISLINGTVRGLNPVSTYCYDSSSGSMEPSTWSFDVSRTPYRFSDVQNKFTVIGCQTLVYIKDNTDKSYQSGCVSTCQSLSDVVDGGSCSGRGCCQTAIPKGMDYYNVSFDASFNTSRIWSFSRCSYAVLMEAAAFRFSTAYIKTTRFNDTSAGQVPVVMDWAIREREAASCVVAKQNGTGSYACVSSNSECVDSQNGPGYLCNCTQGYEGNPYLPGGCHDVDECKYSPCPTGAVCHNTVGGYRCSCRAGLKFSEQSNSCGPNINLIIGLALSSAGAILIVAAAVAIFTRRWQRIVQKRLRKRHFHKNKGILLEQLFSSSADNNASDGTKIFSLDDLQKATNNFDRTRVVGNGGHGTVYKGILADQRVVAIKKSKLVESTEIEQFINEVAILSQINHRNVVKLHGCCLESEVPLLVYEFISNGTLYDLLHHRDREQDGRRRTLLQQLPWEARLRIAAEVAGALTYLHSAASVSILHRDVKSMNVLLNDSYTAKVSDFGASRSIPIDQTHLVTAVQGTFGYLDPEYFHTGQLNEKSDVYSFGVILLELLTRKKPIVDGDSGYKVNLSSYFLWEMERRPLEEIVDVGIIGEASTEAILGMAQLAEECLSLTREDRPTMKDVEMRLQMLRCQQDVAPRAHPAKRTNMISHAIPMPASQHGSRQYSQEQEFVLSSRVPR

SEQ ID NO: 70626 - protein, 92 aa, Zea Mays
MHLVNTMLLAPSSPDSWDFLPTHGMTMNKAKLDDTQSYHPLVEHSIEHRICDARNSTVFTILSVISRIHRRPDASGELRMRRDRETRRGGIG

SEQ ID NO: 70627 - protein, 157 aa, Zea Mays
MAVPSQPALPFPPRPLSSMDGGRIWREEEDGCFAKTHLADFETQQYEGRKREQLRRGIGLDRTSNFFFMEKVDMIIARAWRRFLEKTRLQKLFSRKKTSKPKIDSKKNDDLASEIEDKELYVEHIRLETMDLSFGNLFGKVTIQEPTFEEVIVLYRV

SEQ ID NO: 70628 - protein, 57 aa, Zea Mays
MSVGERRRRAERRLRTARCRCCDICATDMHGDRRNEVGEGRGCTCAWISRHHGHWQF

SEQ ID NO: 70629 - protein, 80 aa, Zea Mays
MCYRGWAACAGAAEDISPSMITTLPNLLTRQMIHGPRPATSCRGSILSTYILPVPHARVEGAVRIVWRRPGVSPFGGGGD

SEQ ID NO: 70630 - protein, 242 aa, Zea Mays
MMKNAIRQQRYRLKKKFFDPFPLHLVTKTSPIRSMSNEEWNDLVEYWKSPKRMETSQKNKDNRSKVKFHQTTGSRSYMVHVENLGDKNIGQEPDALDLFKECHYSRKKKCYTSTVQQAITQMDNKRSATTEGEKSMSATEVVANVLAENTKKNLFLQNVGIQNVGPRSSLRNIEAQLEVEKRANSDLKSIVDAQHEQLDALLKQMQETEENRIREQEEVKKKQAEMETKMQLVLSQIHSRLR

SEQ ID NO: 70631 - protein, 105 aa, Zea Mays
MGAGARLRTMARARVMLSVMAGASCARERIGGAGEDARARTRLRPTQERAVDSARGLSSGRCAGVVQRAVHSGCATTIAKSGWGTRALAVPYFYLILRRLPGLPL

SEQ ID NO: 70632 - protein, 399 aa, Zea Mays
MEVGVSMVMKNQNGSIKLSVTECSCYMEDLDITLNGGASWFYQVFIDGFSNHIISSVENAIKNKVMEGALKLDSFLGNLPKKIDLDSVAAMNVTVVNDPIFKSSSVEFDIDGLFIPSDETAPRDMHLGDTQFALPLGSSSKMLWISLDEDVFNSVSALYFKAGLLQRMVDKIPDQFFLNTASWRFLVPRLYREFPDDNMLLNISAVSPPSVRINVGRIDATVDLDITVNVLDFGEIVPVACLSVSVDVYGAAAVSENNLVGRVELDYFSFTLKWSKVGKLHTILVQTVLRILLKKLFVPYVNSYLKHGFRLPIIKGFSVTDAYILTSYSRMIVSCDVAFIEPEVLSPVQESNTNEDLSYEVLSPVQESKTNEELTNEDLSFEVLSSLLLGSAKTSQPTA

SEQ ID NO: 70633 - protein, 1281 aa, Zea Mays
MRQALPDLFDAQPDLLFHLVTMLNPSILQANSVPVYSVMQEPGNFIITFPRSFHGGFNLGLNCAEAVNFAPADWLPHGGIGANLYRLYRKAPVLSHEELLYVVAKNGVDAESLTHLKGEIKRLFINERRRRVELWINGTVKSSLMLPRINPNFIGSEEDPTCIICRQYLYLSAVSCNCRLSSYVCLEHWKHLCECSPKKHCLLYRHTLAELGDLVCEVSLVSPQRDNVMQNPHLLNDVYVPSKKVKDHYILYRQLAEDWVSNSEHILQMPFVERSYATALEEAEQFLWGDHAMDSVRNITVRLTKAMKWALGVRKCLSKIQDFLKDGCSEKVNYVEIEELVATKCAPCCEPSLTKLQAYAEEAKLLINEVNNALSSFLTVDKLETLYSRVSEFPVKLTESSTLFWELSSAKSWLKKASDCLEQNKLGIIDIDVLNKLKSEIIQLRVLLPEIDLISKLWKDVESWQTRCQLYLQDFPDLKELEGFLLAADGANFSIPELNILKQHYSNCCSWVSRAKNILRKLYATSDYHNAVEELTVDELPIVEKELKRSLCRKQASEALATVMPMEVVEEILKEASILHIEEEQPFDDLSRMLKEATSWEEKARLILERSASLSEFEDHMRCSEGIRVILPSKLHMKAEVDIAKLWIDKCQAYLRPGCNKLAFGDFLKVDDIKDLINQPANLKVILDTSELNSVLNNIEKWEHSSLSLLNNFRALLHLNSIGSTVDTLQRKLEELQGKMNTEIEVGLSLGFEFKVLWELKDSSLMLRWILNALSLCCMIPLLQDVDRLIEEAVHLPASLADCSLVTLLMRALSCLRKSLILLPGSGTSAKSKLEDVENILAEFKEVDVPYPIMTAKLEDAVNNHNSWIEQCNTFFMLSDGQSWAMLQNLRDNGQSVAFDCPEMDKVVDEVKNVEEWLNQCHCTLLLDGNNSSLLSILVKIRGLLDDVCTLYAEDCMKLRLCAVCSCDIGDRLASRCVTCQDWYHGSCVENLSATTQTTIEWMCSFCSLLQSEDQLKNQLSVKMSKGNCPALAALDELISSAKGLYTGIEEINLLKEIVDKARNLNAYLMQILDDSDCYHGEDLTVIFKSLLVALKATSASGLYDDNVSCRIESVLSRYLWKKQIHKLLYGGKKSSIQEVLCLDEEVIPFLFCVKTRVVFKVISRCSVMGKVVVRCGSFPIHHIRPFANESDTSYHCGGLNSEKTNRENSLFDTQKTCSSQFSTLKLLLPCISSIIHLAQKLLQCPRPFRGDVPRTHAKIFPTLKQKSGWRGPMFAWTYYQ

SEQ ID NO: 70634 - protein, 1032 aa, Zea Mays
MRASASAVPMEASASARRSAASPDPGAKKPRLAQPPARDPRSYAAAAAASNGGASAAEQALVDELLGQYRTALGELTFNSKPIITNLTIIAGENLQAAKPIAAVICANILEVPSEQKLPSLYLLDSIVKNIGKDYVKHFSARLPEVFCKAYKQVDPSIHHSMRHLFGTWKGVFPLPPLQTIEKELGFQSSTNGLSGAAPSRTDSQSPRPSNSIHGILGSGAKTAVIADTDDDIERANRLGTERSAGRRLDAPNARPNIEHIQRDPFSNPIHEKLAGRDVRGLGFSNTSQQAVVGTGQVRSKPRGQDGIGGPYYASGVVSSEEKIDKRSNFYTSKDVRPSGSVHFDSALLPTRSINANRVGRPSSNKSWKHSEEEEYVWDDVPSKTTEYSGTHNIIKGEWMSDDGNAKFASLQSAKWADAGPVECIDPKTHKVDNVSRFGFAAGQERRISAYMDQEEYLLGKREVEARIDREIRPYGQQFPAARDSSLWVSQEKALPDNGLDPWVSKFSNQPAEMSICTGTMPASIISSVPVRLSGHYAGRSNLDTTNSVPIRSTEAFGQQKHRYWSSSPPQAHPPSSTAPFARQGSPNHDESDFYPSGSFSQLGQDPQEEYSQRALPVLAKGSHVVVHNDELTQGQPSLQATLQTQKYPIIQSKSHINPSDQLQASFLCENSPSLFRPSIQLGEVSLPSDSTPISSDLTSASNLLAGLIKSGFKPSNHSDAQPLGPSGSLLVASLSLQNAAGENTILQTQTPNTSRPPLPPGLPPPPSTQSAEKAAPLSSLLSSLVAKGLISSPASDSSDAVISQPNKESSINGKDVAASGVPLPALKSSFGKVSSSNSDSSAPPNASLPKAIEIEMGDLIGLEFKPEKLRKYHEHVISYLDDQSHQCKMCGNRFGLEELSLHTSSCGPRESRTIYTGIAPKRWYPSRNIYIDGSHEIEDSAEASDAGLGSAEVCEFMVHADERQIICALCGEPFDDVYSFEKGNWMYKDAVFLDYAKGKNSCGNNVKGEEHVPIVHVRCMPRGSNDGMDVD

SEQ ID NO: 70635 - protein, 196 aa, Zea Mays
MGGGRQDGDRRVPRPVLPCRPPQRRRRRRPLPRQGPEAPPIPDQPQQWMPAIHRHHDGFLREQQQAQQRQLCSLSSVRQPDTSTGTDGHDPYRAAPRRHGIAVRQAPWRRRRRRLPRRDVVHEGGRQPAGFQSDNVLTRSCHCSCNTAAPAVPPWLLLPCERWRAGQQQPRWRRHSGPPLLVVVDARLSDEDHVLG

SEQ ID NO: 70636 - protein, 144 aa, Zea Mays
MQGSSRPSTKCRSSTGEHAGTTAMAPPHRRASRSRCRTQAREHGPSRYYCRRNQASPLRQVGAQPSQHHLYGTRASRRRCSKGVLTSRRSPVVTEHRPSLLHTKLMLSLRRPAPVRCRRPAASAQAKPLRREHEHRLSHLRRCK

SEQ ID NO: 70637 - protein, 173 aa, Zea Mays
MACLCSISLAAPFPGVLSAASRHRRWSSPRLQLPHARLPGFPLHRLLLFLVVSMLHSFITSLLKLVLVTVFSYTVAFILLASSSQSVVPVSDSWRHFPNPAAPLPSLVLAVPQLEADEVASAQARVALTVAHGGNVVCLSKKVEFLKLQNGSDIRGVAVARIEESSHSWNHCC

SEQ ID NO: 70638 - protein, 98 aa, Zea Mays
MRSRADRADRATPRPRHRRASALPCAPAATRRPTELPAPIEPPARHFLHGHFLSVTSSMVEVWERQGIGPLPLQLLELYPHAYLRETGCFARLLEDML

SEQ ID NO: 70639 - protein, 192 aa, Zea Mays
MDEPFENDNGQTEELPSELPCSIKRPKFSVAELLEDLQGRSGSYVETASLSHQHTRAKHWKPKFLSSEKKTIAILGDRSIDSEDPLEHVIDGTSSEEEDATQNHLSLVNKDENQQTMADLFQEVFNPTNMDGAMKSMRSTGAGNYGRMQQIMHMEKDWHVEFSRQYSREHNYVKVIGRKANSLQLHVPGKGQ

SEQ ID NO: 70640 - protein, 59 aa, Zea Mays
MLVTSKIFLLYVFILFFLLFQVHWLLPAPRLSSALKLLTISRSIHICYYNCFKAILFVT

SEQ ID NO: 70641 - protein, 620 aa, Zea Mays
MAVAAAEKAVRCLGRGFDMTCDMRLKYCKHAGGCLVDRGGVETAPLAVPGVGTIGGVPVDVKCGKGDRVRIKSGVLEFNKMSELFNQRSSVEGKIPSGLFNACFDLDSGAWAQDAAATKCLAMDGYFISLFDLRLDRRPLALADRVLRDAPAAWDPAAIARFIDKYGTHVVVGLSVGGQDVVYVKQDGSSALPPAEIKEHLDRLGDQLFTGACAMPPLRCKSKDKLKMPEAFNVFDAQLVAQQRLQAAGMITTLVSSKEGVTVIYSKRGGDTTAGSHSEWLLTVPATPDVISIEAVPITSLLKGVPGAGYLSHAINLYLRYKPPVADLKYFLDFQHHKMWAPALGELPLGPCSNRQQGSSPALHFSPLSAKLYVSPTQAIVPKLPVTGMRLHLEGKKHNRLAVHLQHLSTTPTFIAAARHDKPPVWRGSDAASDDRYYEPVQWRMFARVCTAPVKYDTGWRGAGDRDPSAACVVTGAQLHVAAHDATHVLHLRLLYAELPGCAVVQSRWARGVARLSGKSSGFLSPSSSPGSSGGGSGSGGSQKERHPPEGVVNINSGVLAGGPPVPVAAQKMLRLVDTSQVTMGPQDSPGYWLVTGARLDVDNGRISLHVKFSLLAPAS

SEQ ID NO: 70642 - protein, 92 aa, Zea Mays
MAETPSAVALPLVCASFSSARRDIVPCCMLLVRLGHNLAVILSSLRALLHCVDLPNSLSPCARADPAVNVQSCVRFPSSDSASHHCPIRVSM

SEQ ID NO: 70643 - protein, 88 aa, Zea Mays
MPTQQKATYRSATSMQMRTRIYFDSNLAYLDHPLPPLGLFLQITLNFLSLSQIHLLRHRERFSREIDQIFKNSPFSHNQTFSPQETNF

SEQ ID NO: 70644 - protein, 83 aa, Zea Mays
MKRRARWGIPSEFCAAGNGERDRERRARSLSSLRGGRSSVAGTGRARGRDRACAGGRNRARRRARRPRPVWWRWLADDERGVG

SEQ ID NO: 70645 - protein, 261 aa, Zea Mays
MAGPAPDRAALTVGPGMDMPIMHDSDRYELVRDIGSGNFGVARLMRDRRTTELVAVKYIERGEKVILTPTHLAIVMEYASGGELFERICKNVRFSEDEARYFFQQLISGVSYCHSMQVCHRDLKLENTLLDGSDAPRLKICDFGYSKSSVLHSQPKSTVGTPAYIAPEVLLKKEYDGKIADVWSCGVTLYVMAVGAYPFEDPEEPKNFRKTIQRILNVQYAIPDYVNISPECRHLISRIFVGDPAMASPCSYNRALILIHE

SEQ ID NO: 70646 - protein, 690 aa, Zea Mays
MPQETIQVLDVVLRESPSWNYVTVSRSFFSTTFGHRGDIGEGLECWRGYYQSLRPTQMGLSLNIDISATSFFKPVTIIKFVEEFLNLRDTSRPLFDRDRVKIKKALRGVRIETTHQQDQIRRYKITGITPIPMSQLIFPVDDKGTRKTVVQYFLDKYDYRLKYVSWPCLQAGSDSRPVYLPMEVCKIVEGQRYSKKLNDRQVTNILRATCKRPQEREKSIRDMVLHNKYADDKFAQEFGIEVSSDLVTVPARVLPPPLLKYHDSGREKTCAPSVGQWNMINKKMINGGTIDNWTCLNFSRMRPDEVQRFCMDLTHMCNATGMVVNPRPFIEVRSAAPNHIENALRDVHKRATQILAQQAVGNQLQLLIVILPEVSGSYGKIKRVCETDIGIVSQCCLPKHASRPNKQYLENVALKINVKVGGRNTVLERAFSHDGIPFVSEVPTIIFGADVTHPPPGEDSASSIAAVVASMDWPEITKYRGLVSAQPHRQEIIEDLFTVSKDPQMGHNVNGGMIRDGVSEGQFSHVLLHEMDAIRKKRHHTRLFPEVHGRRDMTDKSGNILPGTVVDQMICHPTEFDFYLCSHAGIQGTSRPTHYHVLYDENEFTADALQSLTNNLCYTYARCTRAVSVVPPAYYAHLAAFRARYYVEGESSDGGSTPGSSGQTVAREGPVEVRQLPKIKDNVKDVMFYC

SEQ ID NO: 70647 - protein, 609 aa, Zea Mays
MRSFLHGDNYLEEALKMRNLLEEFNENHGVRQPTILGVREHIFTGSVSSLAWFMSNQETSFVTIGQRVLANPLKVRFHYGHPDVFDRIFHITRGGISKASCGINLSEDIFAGFNSTLRRGNVTHHEYIQVGKGRDVGLNQISLFEAKVACGNGEQILSRDIYRLGHRFDFFRMLSCYFTTVGFYISSMMVVIIVYVFLYGRLYLALSGLEFAIMKQARMRGNRALQAAMGSQSIVQLGLLMALPMFMEIGLERGFRSALGDFIIMQLQLCSVFFTFSLGTKSHYFGRTILHGGAKYRATGRGFVVRHVRFAENYRMYSRSHFVKGLELMLLLVVYQLYGDVATDSTAYILLTSSMWFLVITWLFAPFLFNPSGFEWQKIVDDWDDWAKWISSRGGIGVPANKAWESWWEEEQEHLLSTGLLGRFWEIILSLRFFIFQYGIIYHLNISAGNKSISVYGLSWLVIVAVVMVLKVVSMGRKKFSADFQLMFRLLKLFLFIGSVGTLAVLFTVLHLTVGDIFASFLAFAPTGWAILQISQASKPVIKAFGLWGSVKALSRGYEYLMGIVIFVPVAVLAWFPFVSEFQTRLLFNQAFSRGLQISRILAGGKKQR

SEQ ID NO: 70648 - protein, 74 aa, Zea Mays
MFFLQQLACICSLVACIVGNSELSEAAHVISCMSNLVYWTVCSCMQTQHKVEMDKRDGTLNTMSAPPMQQMSRW

SEQ ID NO: 70649 - protein, 275 aa, Zea Mays
MANRRAQKVARFKRQKAAETKLQEIRERKERRGRSLRATALSAPVEAGEEDDLEDDGEEEREAWLATISLAICKAFDLLDMLKKEEEMLLAVKERKAKDGNAFAREMLDERTKKAEAWHHKAASRVAYSKPADPITCATFAQDVIEGRASVSQAHEHKHQPLIFGPASLVGGGLTSERERMAAQVFQPSYRMPTMSIEEAGLREMKMMERWQERTAEMMREANSAWHKGGDSSSSSMPQGEGGDEDAEEAKARAWDDWKDDNPRGAGNKKLTPCG

SEQ ID NO: 70650 - protein, 462 aa, Zea Mays
MDPPRPAAGRSGGVGTGDSPVSWDDDDDDCSGGGGRVEGLAGLHIFDQEADEPPAKNSMANRLDTNCIPVANGCNTGTSVEKEPVNGIDPPHEHTGIWVPVSVPPMTAQDREEWHRGFSCNGRNFPEEEFSWELDEENNEMTMWDVFADMVVAAKDKVVSSATYDFGRYGMSVVSNFFLQEAWNDMAQTLADANTGIVNELLDTEPTKWLPDSAATSCMLCGVRFHPIMCSRHHCRFCGGVFCNGCSKGRSLMPPKFRTAEPQRVCDVCGVRLESIQPQLMNQISRATQLPTRDVTDLSTLRSWLNFPWAHTMEYEIYKATNSLRNYYKVGRLKPEKAIPDTILRQAKGLAIVTVVKVGMMVTYKLGTGLVIARRVDDSWSPPSAISTCGIGYGAQAGGEIADFIIVLRNTDAIRTFSGKAHLSVGAGVSASAGHVGRAAEADFRAGDGGYAACYTYSCSKA

SEQ ID NO: 70651 - protein, 522 aa, Zea Mays
MAASGLGLSTSFLPGHDTLLRRRRRRPAGHAAASFRPVTAELGGVATELGRQLVEAVGVGLPCTVMQCGDVIYRSTLPRNDGLTITAPGLTLALATVSYLWSTPGVAPGFFDMFVLAFAERLFRPTFRKDDLVFGKKLGEGAFGVVCKASLANPEAAKKTKAKGKGAEEYWLIWRFEGEDTLYDLMQSKEFPYNVETKILGGIQDLPKGIARENKIIQTVMRQLLFALDGLHSTGIVHRDIKPQNVIFSEGSRTFKIIDLGAAADLRVGINYIPKEFLLDPRYAAPEQYIMSTQTPSAPSVPVATTLSPVLWQLNLPDRFDIYSLGLIFLQMAFPSLRTDSNLIQFNRQLKRCDYDLQAWRNLVEPRASAELRRGFDIMDLDGGIGWELLTSMVRYKARQRTSAKAALAHPYFNREGLLGLSVMQNVRLQLFRATQKDYSEAARWVIGLMARSGTEDVGGFTEAQLQELREIKPKKSSTQRNALASVLRLQRKIMRTIKESMDELNSQRKSIWWSRWIPREE

SEQ ID NO: 70652 - protein, 326 aa, Zea Mays
MAAPSAATRRKLQRKFRLRGFTLKVDALEEAAAFLDRFPDAEDDALDLLLDELDKEPLQSSILDRDAVRRVVALLVEAEEALDVASPAATSARSALRVVDAFLVPRFHYDPIKKVFYEHTGRLAVHGEAGDKASLYRDRYQVLLQRLSRDKYFSKPAFDTVATEHCSCEITSVQSLIGCTGRRWIMGVISQLEERQFYLEDLTGAVPIDLSNAKITSGFFVENTVIVAEGELLSNGIFQVNTCGFPPLEDREASVSLLMGFDFFGGGVIPTEETLRLSSLEKKAVNDMFVILSDVWLDNPERRLWRSWLLFLTGMIVWKLCLPSLF

SEQ ID NO: 70653 - protein, 306 aa, Zea Mays
MEGVSSAPEMDEAISTDQSSRSTKRRAKVWDHVDSELIDGKEKAVCKYCKAHLSSAAGKAHFISEDFELHKKIIAFKKISFPHTSYAVQDGITSCLLEWGLVGDLFTLTLDNASVNNRAMKDMRDALGSQMFFSGEHLHVRCSSHVLNIMVQAGLKVVPNAVGKVRDIIKVVISTPSRLQIFNSIVQTLGLRSKSGLILDVPHRWNATYDMLNEALKYKAALNRYAVEQHHECPTEEDWSKAEALHGFLQEFSDATKAFSADRHPTAHLFLKMLLVIRVGDNVDMKMRELKRDFMAIPVSTVSSES

SEQ ID NO: 70654 - protein, 95 aa, Zea Mays
MGDGGRCRCSYPATGGAQRLRGERKTEMPVAGQREPPWEMGVGRSRAESGAGAWHRRSELREKKRAHGAKLDRTRLGRGRCVKGRWSRGSGAPGN

SEQ ID NO: 70655 - protein, 499 aa, Zea Mays
MRPCSRILAARHFVRSFRFDPSQTTSPAAGFRRLTGANRPFVPKPLFGILLGGFRSNCGVLPGKGVPLGSLGSFLPDSAYQLHGARLQRDTRGNAFSTSANAVTVKKPVGDKVQKDASKKDIDEEIADSQILKNLGKYLLLNDSPDFRFRVALSLVLLVGAKVINVQVPFLFKLAIDWLAALGGAEASLASFTETNATLLALFASPAAVLIGYGIARSGVSACTELRNAVFSKVTLRAIRSVSRKVFSHLHELDLRYHLSRQTGAINRVIDRGSRAINYILTVMVFNVVPTILEIGMVSSILAYKFGSTFAWITSVSVATYIAFTLAVTQWRTKFRMAMNKADNASSTVAVDSLLNYETVKYFNNEQFEVEKYDKYLRNYEDAALKTQSSLAYLNFGQNVIFSSALSTAMVLSSYGIMSGALTVGDLVMVNGLLFQLSLPLNFLGSVYRESRQSLIDMKSMFQLLEEKPAIKDEPHAQPLQFKGGCIEFENVHFGKEDS

SEQ ID NO: 70656 - protein, 205 aa, Zea Mays
MALGEMDWPLGACLAAGMHGIVAAGPLDGRWAWARGRWPLGVTPKEMAAWRVAAGPLESGRHAGEMAAWRVAAGPLESGRRAWGAGRRAWGEDEWMGWRRPTPGESRRESETGGRLGKRLNLIKWRPTLDRDVFVPGQHEHGPQQRVGPGSTTGSNLEHGPARDSCRASPNLNQSCRAGPFSIFHGPCSGRPFRHGPNFQDYTRG

SEQ ID NO: 70657 - protein, 135 aa, Zea Mays
MWRMVFSLNRSTSRVFNTLFCYHRNSGGLQAIMNSKLKTLAEKDEEVVLASGIPCTIIRTGSLQSTPGRERGFDFTEGIASKGRISKEDAATICVEALNSIPLKTHIFEVANGKEKVIDWKAWFEEQTKREEEIQ

SEQ ID NO: 70658 - protein, 103 aa, Zea Mays
MEAMPRPSVAPSLQLQARPCPRWPRRKHCPPSSVASRRVACSASAADADVVDLFDAAKLTVDKFVTSGMVVGLGSGPASALAIQYLGTRLRRGSLAGITAVTS

SEQ ID NO: 70659 - protein, 95 aa, Zea Mays
MDPLTMSESTRSYDFDKAIRFEPFIEHHACVDLPKIKQSIFGKNIGADLPNTRRALVHTFCRTGSCRGARPAGHEETTIAGSEQFRAHDNTMEAN

SEQ ID NO: 70660 - protein, 58 aa, Zea Mays
MIYVYVCVAIDHIARKHIVARRTYTEEALSPSQRCLAQDRRARTRPAGKCARTRRRPR

SEQ ID NO: 70661 - protein, 320 aa, Zea Mays
MNLIKQLRQRTSAPIKDVKASLVTCNWDIEAAQKDLRKRGVALAAKKSSRTAAEGLLAIAQDDKRAAVVELNCETDFVARNDVFQYLASSLAKMALSAQGPGELFMPFGPELLENMPINLDHPKLSVETTVQSAVTEVAAMVGENVKLRRGFMLSTTAHGVVSSYMHTCPQPGMGRIAGLVTLETEDSSTLLDSVKSVGSSIAMHIVAAKPLFLSKELVSASALENEREILRTQAQSSGKSQMAMDKMVEGRLRKYFEEVVLMEQKYVLNDSTNIKTVLNDLSKEVGSKVTIGNFIRMEVGEGIERTEAADGLEVAGGAM

SEQ ID NO: 70662 - protein, 306 aa, Zea Mays
MDEPSPLELADGDAVLWLPEPAAVDLAPQLPDEVDVEPDGVDPASPLLVVSPSLVVDPSPPLPLDCKVDRHRDDPFQPAVETMLAFQSDTERILLLRSLSIPRTQDDESALAVLEPSRIDWDAIEIEPRWDEEGTEGVASEHGLYVKLGLQKEDEKGKKVRESRAKKRGVSTFENEYIDDHEGMAYLEHIPEDRAIVYDWTNPVMKVGALYPNMSVFRLAVRHYAIMKEFELGIETTSTSRYRGLCMGDDCPWRLHAVLEVPGSATIIVTAMTDRHTCTSSARRRTTTPTSSWVAGLALPILMKKP

SEQ ID NO: 70663 - protein, 356 aa, Zea Mays
MRFKLTLNKLYAWSLVSYERVVMLDSDNIFLQNTDELFQCGQFCAVFINPCIFHTGLFVLQPSMNVFKNMLHELSVGRENPDGADQGFLASYFPDLLDQPMFHPPANGTKLQGTYRLPLGYQMDASYYYLKLRWSIPCGPNSVITFPSAPWFKPWYWWSWPVLPLGLSWHEQRRENLGYSSEIPVVLIQAVLYIGVIAVTRLARPTLNKMCYNRRMEKNTMFLLSVLRVVAAWSILAAYTIPFFIIPRTVHPLLGWPLYLLGSFALSSIVINIFLFHPITVLTTWFGFIGALLVMAFPWYLNGFVRALAVFAYAFCCAPLIWASLVKTMSSLQVLIERDAFRLGEPSQNAEFTKLY

SEQ ID NO: 70664 - protein, 146 aa, Zea Mays
MAPMGAKLIDPGALMHRGLQSDISKSPLQSGAEMATITIPGNQEAMHDQPTDDYIPLLQEENTFEGVDGLFALLKDVCHSSELSKRSSDSENHNTFHQVCIRKEDECCPPILGRSKLRADSEGRTSVFSRLVRKHDRGRGEAMKQL

SEQ ID NO: 70665 - protein, 113 aa, Zea Mays
MPLQLASDTILRTLRARVHHHRQGQIVHNLSRATNLDVRLTRLEERSRHVQLTDESICDSCRARLGTKLFAMYPNDSVVCYRCYRSQQGESSSGHGRSMRKDVIFKQSWLVSR

SEQ ID NO: 70666 - protein, 386 aa, Zea Mays
MQAPREGYGLATMDFEYVPASPGSSRWAGESAARRRQRRLSSPSLRTYLTPAFDAVAGGEGGVSGYSSSSSSGGLELGFDASLLRYRRSCLAASADLDSRVLLYSPQSLPPPPPQMRAAYMPADDEVWAPGVSHYGSKHETVTALTVFCALDPWWTTPQLAFAVAFPLNGMYNAACRRLLLCRFYVPWWTMLPQLAFAVALLLKGMYKYNDDACLGACRQLMPYWFPSLLVQAPCLRSFFSKTTNSLRLEKVGDWRENLDVAIVKLGLICRLAGLLAHQVFRIQKTALLSSPRHGQVAIFILQFSAPPHPSSSLLNSSCPRAVQSSQRQSQKLRLQLSSYLLIQNQTWMPMKSLKPCTVAVVIAGSPFSGRSVQNECQPQHSPQRR

SEQ ID NO: 70667 - protein, 564 aa, Zea Mays
MGGSEDDEPPSKRARTSSVESASLPDCFSFSKFSNPLGSTMARPLPSQGKEVMVGSKGVIKKEEFVRIITKTLYSLGYEKSGAVLEEESGIILHNPMVKLFREQVIDGNWDNAVVTMNTIGLQDENILKSAAFLILEQKFFELLKNDNVMGAMKTLRCEITPLGVNRKRVHELSTCMISCSSQQLFLGFSKLGIDSSSSRLKLLEELQKVLPPAVMVPERRLENLVEQALTVQRDACYFHNSVDGLSLYIDHHCGKDQIPSCTLQVDEDGELLLRHTLSGHQKSVMMVAWSPDDCQLLTCGQEETIRRWDVKSGKCLHVYEKSATGLISCAWFPDGKQLSGLADQNFCIWDLDGKEVDCWKGQGSTGTSDFAVAKDGNLIISMSKQNTILLFDRETKQERIIEEGSTITSFCLSEDGDFLLVNLVSEEIHLWNIRNDPVRVNRYNGHKRTRFVIRSCFGGFEQAFIASGSEDSQVYIWHRATGDLIETLAGHSGTVNCVSWNPANPHMLASASDDHTVRIWGAKKSSLKRKDVGSSNCNSNGSRSNGNAHNNVFVQKCNGNNTK

SEQ ID NO: 70668 - protein, 73 aa, Zea Mays
MPPPRSLAPNRARHADKRVISSSSNTSNSTSGESFKNRRVPNRPGDNNSNLSSNSDAIKPRCKRRHKKKRKPV

SEQ ID NO: 70669 - protein, 806 aa, Zea Mays
MSGGGAGGKGAAAPVPAGSRKLVQCLKEIVNRPEAEIYSALRECGMDPDEAVSRLLSQDTFQEVKSKRDKKKEIKEVPETRYRSANSSTNRSLRSGADRGGRSNSVHSSSTDNMTSRPPVSGSCTASVNSNQMQTIASSSANKHMVTDGLAVSLQSSCGFQHGGWSGTPGQLSMVDIVKMGRPQGKASSKPVVTADRGYAGQYPSLPSTNQNLKQSGSMVSPAELDKGLQPAHNLVQVKNHGHFTADSKLPYGTDWSPQDDPTSENQSSQPETSGDPSLYESSFQSSTLVTDVVNSHENSHLELDENSTFAMRSTPASERHLEPSDSIPEYNDGILNNSSSYQPHNYSYTEQDVEDSSADVSAAAENFQSLSLHNDELAAKKTAEDNPAVIIPDHLQVTNTECVSLSFGSFGSGAFSGLLPQKTTDSNVEFLVQEDSATVDPIDARNQDYYESGAVTSPAEENLEAMLGTNMENVDAPSVSQANELSQDVLDPSVLKYDVSSVSSHAYSNMNTPQPSTIEDPQGNNQAHTLSHLSNMMALKAGVFSNARSTQSLPSTSIPTGHPLPQQLAHHPYSQPTLAPITHFPNIVGYPPYLPQNYAAYLSSGTFQQAYPSNGAFHQSAAALLGSGMKYSAPEYKNNLSATGLQQQHQPQPQPPSSVISGYGGLGSSSNIQGNFTLNQSTGTGSTLVFDDALGRQYKDTSQHIALQQPDNSGMWLHGSGSRAAALPPNHFYGYQGQSQLGGFGQAQQQQPSQFGGHGYPTFYQSQGGLTQEHHPQNLAEGSLNGFQVAPSQPSHPSWQHQHTY

SEQ ID NO: 70670 - protein, 276 aa, Zea Mays
MASSASSTTACRHTSWRARSSCRPLSSRCRTTTRPGLGRPRAPKHRSPRATRGSRRTRRTRTSTSWCLVPSLGSTCTPPSHQDSVEECYTKLTELGLLVQEVLNECMDLPPGFLTDYNSDRSFDFLAALRYFPATEEEDNGISAHEDGNCITFVIQDGVGGLEVLNDDGDWVPAEPVEGSIIVNLGDVIQVLSNNKLKSATHRVVRKPVHRHSFVFFFNIHGAKWIEPLPEFTAKIGEAARYRGFVYNEYMQLRMRNKTHPPARPEDVVHITHYAI

SEQ ID NO: 70671 - protein, 128 aa, Zea Mays
MRNEKANKKLMTFAGPRAWTTQEVITLCERLAGQDANVTTVPVAVLRFTRQLTRCFQWTNDVADRLAFSEVLSSDTVFSAPMNETYQLLGVDGNDILSLEKYLQDYFTNILKKLKDLKAQSKQTDIFF

SEQ ID NO: 70672 - protein, 90 aa, Zea Mays
MPYRVAGHLRSPIIVCVVRTTATAAMGTRIWGCSGQKGWPEGLHRDLGSWSSSRRRHSSAGEPGIPRRISFTAAKTPPCRGTAPPYRHCR

SEQ ID NO: 70673 - protein, 1905 aa, Zea Mays
MMMKKAMRWRKGATLESLLTANSESQITPKDRTSRKVPPRTTKLKSRQPRSPDHKTTSRILREHLQEVILSQKKIISRYSVRHYYVKFGSPDSSETAPPFGEMDSFGALVQSSGKLDLTKVVPVNESDAVDTKSEPIDGSAYLELGDKRNLGKQHEPFQQNGMVHSSEKLPDCPYLDIGESNNRSHLTCEEKPRLAEVPADQKDVDGRRPDDIVSDQDNFIGASNDTDMENKEGLQMKTECDPSASVELVELNRHNKEGDKVLYAEPPEVGPAIDSSLGLDNASSGEEPTCVDLPLSSDSAPTVSATNGPNSGSQSGRQMNGVDWSTDEESSNDVDLIDVSSSSSVVSENGDVQNNDCLVSCLQHEEAIHSLSDDHAGAIHNSDEQSPNTSSNWDDMAIGCNNYTEKVHHPVEHVQDVVLDDISMILSKPNDVSEDEDKISSGNADDLSLHPTKLNQEEIQELKTESEEGRSLESGSSPSKASLPNKDHVSMNDVEADTVTIPKETVADTAPTGLDPDGIDERQDGVAPKYSSIHNSVLYESYDDKIAEDTHSLLDDGLSTTFDDDKHVAEDHQFVVLEQRTCPTSLNTCKDDSMQGCAVARDFTDAEKLPGVVSGVLASQLETESHVGETLASTSYAFSDDTEALEIGVPLAPGTSFLPNTSSSLVEKHELTETEEIAEVGEFVVAKESTTSVFAVDVVPPKEFIDANIHPEKVEVLATSLTEEATRLDLQLQSPSREVLETTEAIHRNFGAVDESREDISKKSMLQTDNSPLIVETTSEKCSDRDGDTQFLVKSDYQEELLKEGSHNAEDRSLCDLNKDGAVTLKSNAVEKQPVNAGQDLAWGMHAQDSSSTNPFLDPAYLMSHTQIYSSSSMSSQPCFPEEEDFLSELVIQHDNMGVTADALWEPATPPDDAPLPSEIMTEDDFRSFCQEYHEIDFSSVTNCSHSEPASDSNKIPNAFLIRESDFPCYNSALPVKLDQEACIHSKFCSECVEYSCAVERQGTTSMVVSGKEDRVGKDETPGVDFHLNFLEFSNDNRSPELNMLSVPVDLRQELHGLPEVDSRDSSPLLHKEKTSEECCFSLSNNVVEVKQELEIRADLVPHSSINEKVDGLDEAVPVEPEAHACALDEYDNQDVPHISTSEKNETLTLGKPVLVQGPEVCAFGGFECDPPIIPSPSVDETKDNLEVRMNMILQSFHHSLRTSFQAEQKSECYTSGEHDSQTVPFPLHDENINELDDPPLSNADELDRESKACVPHECDAQIAPCSTDEDIHELDHPPLSSPALVDLESEDHVSDDRDSEVTPCLVKDKIDESVDAQPNLLPGELEQETHAPPELDFRVAPQSAKESDCSTEFDSQAAPCSSNIPVLANTTVSTCISAMPSSEETYQLSPVPPPTVQFQNDSYKDPQALLADSYKDPQAPPPLPPLQWRLGKPRLGLLSRKGCMTEPARVIDPVLQISSQEMDIRPGLLDPTDRSIEPVSCQEIKEDRCESSLIDHNDQNVDFDRLSTRVAVTDVARTEHRLSLETSEDIKQQGHISSSATGVGEHLDAGFTSTMADEEHLDDSGMTHGTALYLSDPLFPLPTYELQDPQPDTRENSEHPSQTHGAASGDDKSMDAVGSMESTLTKGHVSGNRCYQQPQHGESSSETSDHKEHITNASEDGVKHQSGTSEAPSDTAKHSAPGTLLKGNVQESQILQEHNVGSSEDDQPGGLLYSLEPVAPQGENKNQVNNPGLLLEWPGDTSELVTGLEKSCYAHAEQPPVMGWTVGPQMLHPKYGILEEESQFEPNIADNHLIRKPISIKNIPRNPLVDAVAAHDRSSMRKVSELAPPTDKPKPNERNMLLEQIRNKTFSLKPVAPAQQTAMRSPARTSTRNLKVAAIIEKANAIRQAVGSDDEDADSWSDT

SEQ ID NO: 70674 - protein, 395 aa, Zea Mays
MAATLVDQKSVAFMIRNGSGIISVGMEEEDLTRLMIPMMSPITEIEDITAAASTVTVDARVGISTGVSAADRAKTILTLASSDSKPSDLRRPGHIFPLKYRNGGVLKRAGHTEASVDLVALAGLRPVSVLSTVMDPRDGSMAGVTVLQQMAMEHDIPIVSIADLIRYRRKREKLVELIAVSRLPTKWGLFRAYCYQSRLDGTEHIAVVKGDIGDGEEVLVRVHSECLTGDILGSARCDCGNQLELAMQLIEKAGRGVLVYLRGHEGRGIGLGQKLRAYNLQDEGHDTVEANVELGLAVDAREYGIGAQILRDIGVRTMRLMTNNPAKFIGLKGYGLAVVGRVPVISPITKENQKYLETKRTKMGHVYGSDLPGSLPEFANPQEAPTEQDDDDNQN

SEQ ID NO: 70675 - protein, 223 aa, Zea Mays
MAAAQAISKGSVVSPCGNRAAPGFLARRRGAVAARMAPSAARIGGFWRKNAFPGGRLTLRTRRSRAASPTQICQFAEQNPDVLFLQVNYEEHKSMCHSLHVHVLPLFRFYRGAQGRLCSFSCTNATIKKFRDALAKHKPDRCSLGPTRGLEESELLALAANKDLQFTYAKQEPELIPRGDAPGEVVAPEPAKLPAAPKPLVRLGSEERSGWSRQEDEMHMRLS

SEQ ID NO: 70676 - protein, 1133 aa, Zea Mays
MHLYNAWLPPPVSTAARGEAAAFAGAVRTAADAWLPGDSDSAYATLKWISVFDLFIKAKSDIASEDLQALVKLGLEVFHASHNKFVVQIKWGGLLIRLLRKHGKRLSLVVQWRPLYETLIRTHFKRNMGPEGWKVRKQHFETVTSLVCASRNFFTEGVAAEIWSEFRPLLENPWHNSAFEGVGFLRLFLPANSRNQDHFTTDWIRNCLDIWDSVTNCNFWDIQWASIIARCIKNSRSVNWDAFLPLLFTRYLNMFEVPISSGNGSYPFPVEVPGNTRFLFSSKTRTLSKAIAKSVVYLLKPKSLAFEYFEKLINFLEQFYHPSNGGRWTYSLERFLRYLVVYFEKRLQHEQFVMAVEDHDQSYLGKEERSVFVKAILKLLDRGQYSKDNSLAETVSVATSILSYIEPTLVLQFVAKNFQRALETTTATHQLKNAVTSVAFSGRALLLCSLCSSQNDDSSVVDSFSDLVVASLSNALLGMDANDPPKTIATMQLIGSIFSNLAAVSDDVPILLQSTTLSNWLDEFFSRLFSVLHNLESSSPINEGYQSSFMSGTFLVDSPYYFCMLEILLGKLSKPLFNQSLKRIAKFVNANILPGATSEVGLLCCACVHSYPEEASVYLVKPILETIMSSFEGTPTTGYVGRVVADKASTKAALSPALETAIDYYLRVLAISISYAGPTLLNYKEELNHIITSAFQSPSWKVNGAGDHLLRSLLGNLVSYYPIDQYKPFTCQPIGNIIEPWGCSKAHQDREDEMLNFPPKWHDPSHDELSFANELLQLHFQSALEDLLTICQTKVHSDTGDEKEHLKITLLRIHSALHGVMSCLPEIRPSYKDGRSLEVESAFFIAGSAGSTVGSSEMREKAAEFVHIACRYLLKERTDDSILLSLVVRVIDALVNYGSLEYQEWSSHVQAWKLESASIIEPPCNFIVPFHAQGKKRPRWALVDKANLHSTWRCSQSSYHRYRMNADVSPSVPMINLMNDLLDLSLHNYETVRSYAGRSLTKLLKRWPSLISNCVLTLTGNLRDPKAPEHVVLGSCSILISQTVLRHLTTDSVSLSSFIMGILESSHHESLKCQKAITELFVTYNIRFSGISRSFFKTPENQADKPGFLSLISQINALGFETNGLHWRRTAHH

SEQ ID NO: 70677 - protein, 100 aa, Zea Mays
MAGWASAEQWRSGGPRMADGGWADRGWADGRTADGRAVEWRSGGRAVEGWRSVDGGVCVRRAASPRVVPGAAGRLGDRESRREQARARRVAGVGVRLAAS

SEQ ID NO: 70678 - protein, 557 aa, Zea Mays
MSNQKMSLEDDVTPMSKFTGVQEVSGQDTPVEDFNRTSPNTIEVPKVIDLQGKGHCTGETTSLQSPRQKVDASWLKRTNKSVAEDVPESQGSTKNIPIILLDDDNDDRGKELENSEALDQGLHSQNKRTFGKIDLNCTELRQQGLLCLDDSTIQRLPDLDLAVNARKQMSRPIERLFFTEEKDTIRGKQEHHEESSTMHAPYSNFFDLGPPWNTGSLKGPKGLPSEVKFGIMDRAPEFSLDLRLDSFTDNNSVAALRSDKLFLGSTSSTSRKLTEKLGMYSYKRQSAPWSEEELDFLWIGVRRYGVNNWNAMLRDSRLRFSISRMPEDLAKQWDKEQKKLVGPAQAVGYLGRASCSGCSKSASVGAQAQTDLSLGEYYLGRASCSGCSKSSFLGAQTDLSLGDVYLRSGRAPERGHQHHLPTSLGVGGFPGASSSYGRSGGRRRRASKSYYYENKSAWFQEPPSDRVPQQPGGRMGPEMWPSIMVVPPPTADPPRDDDVKPHVLLPDATLKRAIRRSADWGSFSRRLFLSGDLNGGAAGAPVPSDTGASSEETVSDS

SEQ ID NO: 70679 - protein, 379 aa, Zea Mays
MLEPESSFGEISILCNIPQPYTVRVCELCRLLRLDKQSFTNILEIYFVDGRRILSNLSESEYGGRVKQLESDITFHIGKQEAELTLRVNSAAFYGDLHQLKSLIRAGADPKNTDYDGRSPLHLAASRGYEDVVQFLINEGVDIDLTDQFGNTPLLEAVKQGHERVAALLFAKGAKLSLKNAGSHLCTAVAKGDSDFIRRALAYGADPNCRDYDHRTPLHIAAAEGLYLIAKMLVEAGASVFTTDRWGTTPLDEARKCGGRTLGALLEEARASELSMFPERGEEVRDKVHPRRCSVFPYHPWRASAGEERRAEGVVLWIPHTIESLVASAQEKLGLPGPAASRLRLLCEDGARVLDVDMVNDGQKLYLVGGEDGDQEGGQ

SEQ ID NO: 70680 - protein, 483 aa, Zea Mays
MYRRDTAAAQRIRQKKALILIGERLLLTTIRFDFNIQHPYRPLLDAMQNLGINQKEVKQVAWNFVNDWLKTTLCLQYKPQYIAAGSLYLAAKLHNIKLPLHGAHVWWHQFDVAPKPLEAVIHQMMELAALKKLMPARPNPVKLKETLCEAKLSLSNSPDSVLNQSNLLISSSSPDIGEPSDKVQVDSCQYLISSHMGDCRVSGPDSSSLNTCANRNVSCKAHDEESLDQALIIKHDSGMMPSSNQTSLYATVGTEGSAELKQDVSHCNDFNIRVNDESLNQVLRNQHGDAIPLPDVVSLDAKVDKERSWCVEPLIANSDCCTDSVNVDSLCTDQRLADAPSGPTADAPSMLAEEESYPFSAKLENIDVARIKGLLMKRKSRREIQDRAIASDGLSEEDWIERELESGIVTNQEANCAAISDELSDEAWIERELESGIVVGPRNEQAITFDGLSEDDWIERELESGIIVEPAPATKKRKLESSC

SEQ ID NO: 70681 - protein, 91 aa, Zea Mays
MEIPLVSVGDDGRLFTVGGNDGKNKFELVNREKRKLTLDSSDRLVSLQKLGGAVTCMATIKECISLAKERRRSLREILLDSIKAMEVDQTE

SEQ ID NO: 70682 - protein, 70 aa, Zea Mays
MLASSSLDSWNFLMTHGTTTRSSLERAGEDTNPVRALATTKSRVREDEFNSSTETRARAKPDGRRASAPQ

SEQ ID NO: 70683 - protein, 139 aa, Zea Mays
MAAMAEQRGSWAPSWRESELDAQGAWCPVSKCDEERPSTRGLLTVGSNSAAMRSDQAGEATRGRTPGRAATKEAEAGHGELKGAVRAAAMASRLSTCAWSRRGLAGRLHGRTERWAPSRDGEDLGARQGAAMGTSLTRG

SEQ ID NO: 70684 - protein, 996 aa, Zea Mays
MCVRKEIPPPELNIRVHWLGAKVVCSDSCIATHMVTVDPNMTGNGTSIPTLVMCTTPPKMQHLEKYGIPVPSYALVNREYPDQELDYFIEQEDFVEVHGKRFLKPFVEKPVNGDDHRIMIYYPSSAGGGMKELFRKVGNRSSEFHPDVRRVRREGSYIYEEFMPTGGTDVKVYTVGPGYAHAEARKSPVVDGVVMRNPDGKEVRYPVLLTPTEKQMARDVCNAFRQMVCGFDLLRCDGRSYVCDVNGWSFVKNSYKYYDDAACILRKIFLDAKAPHLSSTIPPTLPWKSEPVQPTEGLTRQGSGIIGTFGQSEELRCVIVVIRHGDRTPKQKVKLKVTEEKLLNLMLKYNGGKPRVETKLKSAVQLQDLLDATRQLVPPTRSGRESDSDADDIEHIEKLRQVKAVLEEGGHFSGIYRKVQLKPLKWIKVPKRNGDGEEERPIEALMILKYGGVLTHAGRKQAEELGRFFRNNIYPGEGTGLLRLHSTYRHDLKIYSSDEGRVQMSAAAFAKGLLDLEGQLTPILVSLVSKDSSMLDGLEDASTEMDEAKARLHEIIISSEKAKNTEGPVEFPWMVDGAGLPANASQLLPKMAKLTKEVTSQVKLLAEGEDERLALTSTFSKYDQAKALGKTTIDVARIAAGLPCGSESFLLMFARWRKLERDLYNERKDRFDITQIPDVYDSCKYDLLHNAHLNLKGLEELFKVAQILADGVIPNEYGINPKQKLKIGSKIARRLLGKILIDLRNTREEAISVAEPKFIEDEALFLPTKEAEHQQKVHVRNEDGRRSSSTSEKSLDQEDEDDRETKYRLDPKYANVRTPERHVRTRLYFTSESHIHSLMNVLRYCNLDESLQGEESLVCQSALDRLHRTRELDYMSNIVLRMFENIEVPLEDEKRFRIEMTFSRGADLSPLEDKTSESSSLLQEHTLPIMGPERLQEVGSCLTMDKFEKMVRPFAMPPEDFPPAAPPQALGYFSKGAGVLERLASLWPFHKSANGK

SEQ ID NO: 70685 - protein, 389 aa, Zea Mays
MGISHSLLKPSDNPLYDFGGKGTFSVGKIELPLSFGVAPNARSEQVTFDIVDMVYPYNAIMGRGSINKFEAAIHGLYMCMKIPGPQGAITVYGNQQVARNIERDFVPGLWYRSHFMPKILRYYLESEAMAMVPHGAGGSSVSMSYPVLSPASYTAWAIKVESILDAQGLWEAVSPPDDGEVNAVKNKTARAQLLQALPDDILMQVSTKKTAAEVWASLKTRFVGADRVKTTRLATLKGEFDKLYMEDGEALDDYAGKISGMAARYAGLGATLDDAAMVKKLLDTVPDRLFPAVAGIEQFCDVETMAFEEALGRLKAFDERSRRRTRAGGERRDDQLLLTEAEWKARQKKKSSIGKCFNCGNRGHFARDCPKPKKEEALFADAEEEATLL

SEQ ID NO: 70686 - protein, 321 aa, Zea Mays
MLPSHLSRLSPPPALAEMRQAQAVAMSGDSRGKSMKYHAVHMNSSRGLYLGFMLRLSESTDILGVIIRCLQSVTPRLKPTAECVKRELIQLPTQDFSWLPYGLHTKNEYWNNVHCSLTQWYRPNPLCCNEHKNNNNLITSSVIGSTFPEEDKTNLSSAAQHGGTGFQDSDFPPVKVGVLIIPHDSPEDMEPGAETYALEVIAEKEKGMVVHTNACLQDLDEKLLPKAINYLNQNPESKEYQMCFKSRHGTAHLYLEKTSAQMQKGRTSKSKTTKLQARKKRVIPFDSVEIWKQASRDYLKLWVVRASSTLRSLFRSWAGHT

SEQ ID NO: 70687 - protein, 187 aa, Zea Mays
MARTKTTQHKSTGPHGVPRHQLASRHEGSSSGSNDPIGDLEARVERLRSELCHGCREHAHDSRCIAELSAEVIRLEQEISKRNTTIDWAINSCSFAWDCEAKALAQVAELSASLENLQAYCNTLHEEAHVLYDRLHPNVPPEVAAMGAGPSRTADGELDLFGAPPAMNLADERSPEAGSGAVKDEEN

SEQ ID NO: 70688 - protein, 355 aa, Zea Mays
MAAAADSASDQNPKDAERHVLTAESDADFSEEDYDEDGEEEYEEEEELDGPAAAAAERERMQSVLRRLSSDPVGIRVHDVIIKGNTKTQDELIEAEVAELLRAAPTVQDLLRAASVATARLHDLDIFDAVKITLDAGPPELPGTTNVVIEVVEVANPLTGTAGVYSKPEARSWSLEGSLKLKNLFGYGDIWDASGSFGWDQTTEVGVGVCLPRFKSIPTPLMARASLSSQDWLKFSSYKERLLGLSFGLLSTRNHDLSYNLAWRTLTDPSRVSSKAIRRQLGHNLLSALKYTYKIDKRDSHLRPTKGYAFQSTSQVGGLWNSKGLRYFRQLGRTVISAGFQIKGSWPNRGAEACP

SEQ ID NO: 70689 - protein, 511 aa, Zea Mays
MDRERSSRRPRDDDVHHRSRERDDDRHRRRSRHDTDGHHRYEGGDEDRRRRHRHRDKDGSGGGEDDRRHRNHHDNDDSRSHSYRDGGDDDRRRGKRRSVSPSESPPPSVKRDRSSSRPRESVERRDSTDREPRSSSRKRKDHEGGGDGDEPVREGGKRARASVDLPPSKEERPRRERRRFEDVDENGKNGDMGKWGKEISSHELQKEELSINGGLQSYDAPNAGSQQPLSAVSVPSSVPIPSKVSSISTNNANEGVSIRSDEVTVKSSTDGSAMSAASKSSNLSLDALAKAKKALQLKKELSEKLKKLPMLNNKLATAVTATQVSKEAAKTSVSAVDAQHFSKGEAKLTDVSSLPTSSISGTPAIGGVIGIPGLTHIPNLDSVKRAQELAAKMGFRQDPQFAPVINFFPGTSTEVTVAQRPAKAPVLRLDSHGREIDEQGNVISMTKPTNLSTLKVNINKQKKEAFQIIKPDLDSLAKSSVHFDERMGINQKKLLRPKRPGFQFVEEESIW

SEQ ID NO: 70690 - protein, 77 aa, Zea Mays
MLNTCAYICARSCGGPLASWCDRVSDPCMGGVVAREDDDATQRHGGTHVMYGKAERKQRERERGGEVAARKEHARIL

SEQ ID NO: 70691 - protein, 391 aa, Zea Mays
MTHFAPSLASTPGLDMKVGDEEALIEAEGNCFSNFHVAGSSSRVAFALVKRKAMKARHINDYTYPVRDWFPSEPTRELTDAETAARVVFRQILSTPPFISRNPKIAFMFLTPGKLPFEKLWELFFKGHDGRYTIYVHASREKHEHVSPIFIGRDIHSEKVGWGMITMVDAERRLLAKALEDIDNQHFVLLSDSCVPLHNFDYVYDFLMGSRHSFLDCFHDPGPHGVYRYSKNMLPEVRESEFRKGSQWFSMKRQHAMVVIADSLYYSKFRLYCRPGMEEGRNCYADEHYLPTLFHMMDPAGIANWSVTYVDWSEGKWHPRSFRAKDVTYERLKNMTSIDVSYHITSDDKKDLLQRPCMWNGLKRPCYLFARKFYPEALDNLVNLFSNYTIF

SEQ ID NO: 70692 - protein, 55 aa, Zea Mays
MKPERAREKHRGKLTDYILWGVLEVYLGMREYQTTWVLLVGSCHRRPASSRHLCR

SEQ ID NO: 70693 - protein, 382 aa, Zea Mays
MAAPALRITARLGLALDGATAARRREASAPVAVPAAPWLKKAAVRCQRAVGAAVAEKKDAPVSVAQDRSGDGGAAPELTVVMKFGGSSVASAERMREVADLILSFPEEHPVVVLSAMGKTTNKLLMAGEKAVGCGATNVSELDELSFVKELHLGTLDQLGLDRSIVCGLLDELEQLLKGIAMMKELTLRTRDYLVSFGECMSTRIFAALLNKIGVKARQYDAFDLGFITTDDFTNADILEATYPAVARRLHVEWINDPAIPIVTGFLGKGWRSGAITTLGRGGSDLTATTIGKALGLREIQVWKDVDGVLTCDPNIHPKAKPVPYLTFDEAAELAYFGAQVLHPQSMRPAREGDVPVRVKNSYNRRAPGTLITKARDMNCFD

SEQ ID NO: 70694 - protein, 410 aa, Zea Mays
MLTDGSGGSGSGTGNAGDNLLEELNRDAENQENADYDDHANIDEKQAWLNSESWEPDPVEADPLKGNRNRRKVDILGLMVSIIGSKDQLVNEYRVMLAEKLLNKSDFEIDSDIRTLELLKIHFGESSMQKCEIMLNDLIDSKRTNSNIKTSLLKSSQTVPGQEEAEVSHDVLDATIISSNFWPPIQIEDLVVPASVDQLLSDYAKRFHQIKTPRKLLWKKNLGTVKLELQFDGRSVQFTVAPVHAAIIMRFQEKSSWTSKALATEIGIPMDSLNRRISFWTSKGVLTESAGPDADDRTFTVVDSMSDVNKDSIVNERMAEYQMTEEEGESSVASVEEQLKKEMTVYEKYIVGMLTNFGSMSLDRIHNTLKMFCIAEPSYDKSLQQLQSFLSGLVADEKLETRDGLYLLKR

SEQ ID NO: 70695 - protein, 237 aa, Zea Mays
MAPPLATRGLPLASRGPPSCAASCSSCLPSYLQLGRRPSRRFRCSSPQVDAAAVPPGKGGEYRPSFADDLLLAFFRSKMVKEVGWDSEKPGYAGLMEVANRLMVKGKSALETEQAAVRVLQSLFPPLLLVLYKALLAPIANGQLAAMMLARATAISCQWLMGSCSVNSVTLPDGKSWSSGVFVEKCKYLEESKCLGICINTCKLPTQTFFKDHMGVDLYMEPNFEDYSCQYTAKIQK

SEQ ID NO: 70696 - protein, 82 aa, Zea Mays
MAMQIHSNHAAISPIIGSRKTETEEEELACRPPPAPWLHRLSRSFISSMEKVGVPRRQHFRRLHRRPVPHGPSDQLVVALPS

SEQ ID NO: 70697 - protein, 218 aa, Zea Mays
MWPSCDSPSSSPGMAAACPANMGAKPMWPPAPRVAPAAEAPGSSKPAGIPIRCMIPAASPVPAAAEFRKEGEEKPADGAHMWWCGLASPEVGDGSEGATEASADAGMVPVPVAATMAGSACCSSHWTVSPSDLWPSSRVSWKIRAAQSAGIRIRRPLPSTLVCRSLLELRLGASACCLLSPGCATTCSCCCSFPPPPPSCCDWWIWICRCCAGCCCCC

SEQ ID NO: 70698 - protein, 64 aa, Zea Mays
MADLCLLSCSSWRVPHLPHALLQMPKGSSGSCHNYLLSYCTDRLDVIFKDCFLFEIVPAFDSLL

SEQ ID NO: 70699 - protein, 225 aa, Zea Mays
MSHSGTGPGGGGARHSDSMPAESETGNNNLGLESILPLPPQPQRPPLPPSVRGSSSSSVSAGNKRKTSGSSMGAPIVQSSSSAQAAENKDANKLVVADTSNTGTRAVASVDIAGLDDDEEDIPEDMTGTGKRQKRRTSIVWKYFTKETVEVEVNGKKFEQLWAYCNFPKCKQRYRAESNHGTNAFRNHLRSHHSIVKGQLELKAEKDNGKDVTTIQPFRRKAYWY

SEQ ID NO: 70700 - protein, 82 aa, Zea Mays
MNSGQSSRRTHGVRRGHWTAPACCCSHRDKKGCCWGRNRSSEGEVAMGRGVETTAFKVRTWGELCMGSATTGKRPGRPWRGA

SEQ ID NO: 70701 - protein, 111 aa, Zea Mays
MDYLQNVFCIIGLVMFHGRQVYIYCFSFNVIFFLFFYHYICHIYFWNRVQWCSMKTVACKIFMTSCGIVSLRGVVVMVHSFAILERSLRTATECATIVLPLLSRRILMSPV

SEQ ID NO: 70702 - protein, 247 aa, Zea Mays
MPPAFAAAPSSSICGVRIPTVRRFEAQSTVSTPRFMRNRVAAKTRSTSAWSLKAGLWDSLRSGLLKNNSSTETVEPPPAPLEVEEPLPVEIVLLERTLPDGSTEQILFSSAGDVDVYDLQALCNKVGWPRRPLSKIAASLRNSYLVATLYSIIRSSETEGEEKKQLIGMARATSDHAFNATIWDVLVDPSYQGLGKALMEKVIRTLLQRDINNITLFADNKVIDFYKNLGFEVDPQGIKGMFWYPRF

SEQ ID NO: 70703 - protein, 57 aa, Zea Mays
MEGAPDMGTPQANVGIMRMTRWAHMSASRQAWSCWQAEQGRVGRGHRRFSPGKGFTF

SEQ ID NO: 70704 - protein, 417 aa, Zea Mays
MPSNLVPHKVDSSACFCRVDRSSAAAAARRIPVSKACVQPSLRASIHPLKPRPGAERSRGGACPLLPGLPDDLAIACLIRVPRADHWKLRLVCRKWCRLLAGNYFYGLRRRLGLAEQWLYAVKRDGRDGRVSWDVLDPSRGEWRALPPVPGEYAEADGFGCAVLGGCHLYLLGGRDPRRGSAMRRVVFYSARSNRWHRAPDMLRRRQFFDVCVMGNRLYVAGGEGGGGGLRSAEVFDPAKNRWSFVAEMAAPMAPFVSAVHGGRWFVKGIGAQQQVLSQAYSPESDSWSIVLDGMVTGWRSASACLNGRLYAAECMDGCRLRAYDEAVDAWSTCADSKQHRGSSQAAAIVALHGRLFVVRNDMSVSAVQVAAEAGKQRWQTLAGKAHTKSFVTGLLSNLAGRSRAKNNILHCQVLEV

SEQ ID NO: 70705 - protein, 103 aa, Zea Mays
MNASGICGSGGCTIWGEEEEVVDLPSARFGGATFHPRALLARGPGAMRPRGRRLGMRVELDLHGGFAGAARQICGAGTANLRAAAADRGEAEQSPVHAYTDNI

SEQ ID NO: 70706 - protein, 350 aa, Zea Mays
MEVPWLLLVHGSVTALVVVSFLCGQWPIFEGTFIQSINHFLTFGAYHYLLRFVQSVCGTGARDLVLGVEGYCCDRPNPILQVFYVAIIGVTYFIIVQTSFQYIPGYYVSGLHRYLSVVAVSVGAILFVLTSFSDPGTVTAENVSQYVSSYPYDNIIFVEKECSTCKITRHFLICLYGALILGFILAGEIKERKIIYILTVYYGIDNSFSGLFPHVAQWLLAVHNTQILLSVFLAILALLLGGFCAYHAHLCLTNTTTNETFKWQDYIMWMKKENEAKADAATLRSSIGSANSDAQKAPPSKWRTFFMRSRTPSMEPVVRNNIYDRGMITNLCEVVVPLSERKAFSRMKSD

SEQ ID NO: 70707 - protein, 109 aa, Zea Mays
MVTPWPTTDLPKDLRSIKRFQNLQSLIRGIRNVRAEYSVEPAKRISASVVATADVLEYVSVSVQIHFVSDTFFLECAGELRILYKREEEKPYKRWHLAEQVPQGSYTQP

SEQ ID NO: 70708 - protein, 157 aa, Zea Mays
MALRRALLRSAETSFERKGGGGECCDDGSDTRWWPPWLRPLLSVCFFVQCRVHTDAHKSECNMYCLDCMGDALCALCLAARHRDHHSIQVSGEPSAVRRLVQFGSSGGCVLVPQCLCLQHISFPSNPSPVPSVSLMGISGESTGRSGSPKQSILGCN

SEQ ID NO: 70709 - protein, 76 aa, Zea Mays
MWREHAARSSGSSRRAAGSGPPRRSPAPRPPPPPSLGTTQKAVTASSGDDSESRPARARESSVGRGAIGVPLLCDP

SEQ ID NO: 70710 - protein, 243 aa, Zea Mays
MQVLPICSRLLNQEIMRVLNIRRQHGAAVDFEKFAAASPNQIHPSPPMPNFCGNGFSPWNGMHSERVGVPQGAMGWQGPPQSPASYIVKKILRLEVPTETYPNFNFIGRLLGPRGNSLKRIEACTGCRVFIRGKGSIKDSGKEEQLKGRPGYEHLSEPLHILIEAELPANVIDARLAKAQEILEELLKPVDESQDYYKRQQLRELAMLNSPLREESPRSGGAPPSPFSKTVSGRPNKTGDTEL

SEQ ID NO: 70711 - protein, 53 aa, Zea Mays
MIFTHIKSSERCIRFIGVTWKPIDALATLKSVPFIDTSGEVSNMIYKMLRSCG

SEQ ID NO: 70712 - protein, 52 aa, Zea Mays
MLMQIKLDKEKKILSIRDRGIGMTKEDLIKNLGTIAKSGTSGTGAARVSCRS

SEQ ID NO: 70713 - protein, 213 aa, Zea Mays
MNWTCLIQGTWLMCSSSRGYLAPEYTIQGQLNKKSDVYSFGVLLLEIVSGRCHTDPRLPVDEQFLLEKVWTLYEFDDLESIIDRTLKRDFDTEEALWLLKVSLVCIPDSPKIKSSMSMVAKMLQGSSIKVEWMQSKLEGCAPSRITAAKAIVKAGIVVMAPQAISVLGGFRPQGKTIDNVVKVFFPWADHCRLVVSGLLPMGGALERLIVSRI

SEQ ID NO: 70714 - protein, 250 aa, Zea Mays
MLHGRCLYIIEELIAKRQQLDAVNFAYEAGLQEKFPPVPLLKSYLEDSKKTSTAASDNSSTSSSGQSGSNANKKEQSALRAVIKCVEDRNLEAEFPLEGLRKQLEELEKAKTEKKKAASSATSGGSSSGPATKRIRASNGGPMPPAKPEPAGDQGGAIRLPTSRGGSRFQRRHHHAILHPTHELPPCPLWRVRQRDGSLRQRNGPCFPPGLLPVGSVMKQTKNKVKQQKKSLMNDMTTTDNRAMALFCSD

SEQ ID NO: 70715 - protein, 103 aa, Zea Mays
MKGSPGQIGPVLRFRTGAPRHAVVARGHARRRRRAPSRRRATGAASPSNADPWPKPARYVLPLARRRAQKPKKLNRSRRGVPASAWEPTPSINHGRVSFAPTC

SEQ ID NO: 70716 - protein, 61 aa, Zea Mays
MSRQKMIVKWTSSNNTNLVLPRQAPVHLPPPCCFKNFITLFDALGDRSCVPNHRCISFLEN

SEQ ID NO: 70717 - protein, 66 aa, Zea Mays
MHLGSARTNLPWKREVDDSESGCHIWHRAVQHRQKPNPLASASTAVLVAVEDSRSRTESHGQMCWR

SEQ ID NO: 70718 - protein, 161 aa, Zea Mays
MITGDQHAIGKETTRRLGMSTKCTLPLLYSEQNKDESLASLPIDELTEKADGLSRVFPEHSVINRVVLTGRAIFQKMKDYTIYVVSITIRIVLGFMLLALIWKFDFPPFMVQIIAILNDASRKDDDASRIYARARSFVRGKEGKSGRHTIVVGGASRGVGV

SEQ ID NO: 70719 - protein, 323 aa, Zea Mays
MQQKSKNQSLASFDFESVMDPCEVYCARSPSLLVESVNGAATAGQPSTQPYEQPDCSTKLLQAQTRSQSSLTSSGEMSTGDSLQKNASGGAFWEISLLYNDKSKEKPAMDFSSQFDMPLDIVIDKCIIQEILLHFTMKLLEEGFDLCAHLLALRRYHFMEIADWADSFIASIYQKKWSFVKSEQKRSEIQGLMDLALQRSSCDSDPYKERLFIYMRESPVDSVDASPCGLDLLDDILLGYKAEWPMNIVITVDALKIYAEIFCYLLQVRFAVFSLTEVWRFLKELTQFIGRSSHSRSDVLKKLNFVMKLSFMQPCVVDWSFLI

SEQ ID NO: 70720 - protein, 82 aa, Zea Mays
MEMNEERKVSLLGLADILSASIGGFSWAPLISKICKNKVKAEAWFTGLSALICRGQHGSQVQHIDGIRIAGLPFDLYTTFNN

SEQ ID NO: 70721 - protein, 53 aa, Zea Mays
MMQFTHDSLSQFILHIFLYGGQLIIKRRATHRRRCHTLTIGQLIMVTHLLTLA

SEQ ID NO: 70722 - protein, 257 aa, Zea Mays
MTTAGEVDSAAGGEDLEPLFDYKRVQPRMTFCFDDSDLEVADIFKYCNKRPKVHTSTEEEGKPDEEVAAAKVVVLDEEDWLQPPPPKAAFRATAEEDSAFRELRLKKQEWAKFAESAEDILQKLDEITNKEVGPKEPPEQIILDEESEPQVEKAREKIVISIQDKDGQQQMRVYKDEKFDKLLKVYAKKAKLNPSDLSFVFDGEKINPSSTPQDLDLEDEDMIELYRVRGGLVGKSHLQKCQSSLCYWMSVYKTPVS

SEQ ID NO: 70723 - protein, 1515 aa, Zea Mays
MYSSYSAAAFALRAAKPSLHAHSSYSYFYHPPPHLCHCDDADEHRHHNKVVPRSPYLAPRFLFDGCLLRHSAYLLLSAQLRLLPPPPRPYASRCCRRRAPIGCCRDGGGGRQLAGQLCCHVEAHKCRCCGSGAGRPDLGAIRRRLKAPECRCGSSGDGTLLGAGCVRRDVPRLVGRAMRQEVWEYEGGQWLYGRSSTECLDSEEEEEDCGYGQLEVGGMHFSRRWEDGNVDDGDGHCMDCCRRKGIENYYSGEDVYSSRRRERRDLNEGRHSFRDSDRRQRSEYYDDEDDLDLGQRKQGWEGRDTRNFVPNDAVDTRSVETRRYCDDGREYNCIRDRRNFNSDDVANVRRAGRYAEDIGGFDRRRESRDFEIDDKVIVRREGRRHRNDHRYVSRHPRRSEDTDGEDVSLLRSRHWNDKEIGYNEQDLADRRYYSMVRSQKSAGASSLHEDDSKRASNFRSTFDARHTGQKENSASSVRWHDNVGGRTEQISEERDRRRSAGWSNDERERYDYDDAQFVRVRNSRIGRQDDKFITEDETRVTSSSKNTSILKHGSNADQQAAVHKDGSTKSSQKITEISEVHDNSTEQDSRAQRYHQEDRENYTKNTPSSVQNSVKMASDSRRQVDQHNEVNQNLVSVTDSRKNSGNLNVTIDSSHNVSRVSHSMRNHNEINQMDIDDSSTSLQNITHVIRDKKSIVNQQVIHETDIDAQNITHVDISKIHASDTSTSRSSQSHLETRSDMNSSSSMGFINRTRSQEKEGYGNMISANDSGMVRGSQSHLETGLYDPFHSKPSANITDNKRESHEQAELNIANASNAAAANTSGSHLQTKTDYQFQSPSAVAIDSMNEQIDFAKIHAIDATVSSSQGPVIRNDNQVHKASTVHWSSERQGMNGRQITQVSNTERDDEARSIFPESSQDTHHNMDLIWQQADTSGISDDKNITGLLVESTKKGFMTNVDMGKQEATMGSYDQEVRSEITAGSSLPSDSSARQSVKESMLESAARLEKSSTFLVGRFVDELQQGVSDPDATLTKKNGKSIMEGITSSSSRSRTKGPADEMWDVQSTTSEETFKTADKEEGSSADGATNSASQTPKNESVVARKVHKSLWAYVADIIRLGFIQHGDSHDSSHKSVKKSSSNNSQSTEGWLSSQERDNDGTKKKNGSTNTLGGGEQESGVASMSNEEYLHTDTHGLQISETVVEPQVGRSEGDLLPTSSTDDLHISGGRTKQSDAGELRKGNSIDDSTPTYLDITIGHLPERKTASRITTEGSGEFITGKGMLAGTSSVTISAMEAGRSEDGADSIYDPSGAITPYHDSQTQTVMPHENTSTGILGPPALPVGVSTRFEEKNIMQEAPEIIKTGGKDTELKRRNFQRNKQVLKDTFDEWEEAYQRDAEQRKADELFMREALLEAQRAADIWEVPVGAVLVQNGEIIARGCNLVEDHRDSTAHAEIVCIREASNKLKTWRLADTTLYVTLEPCAMCAGAILQARIDTVVWGAPNKLLGADGSWVRLWIVGW

SEQ ID NO: 70724 - protein, 324 aa, Zea Mays
MQRDTSSSDVSASHVGRVRRRKHPTEATTDGNRANGQPLLVNDQNKYKSMLTRTYSTVWMIGGFAFIIYMGHLYIWAMVVVIQIYMARELFNLLRKSSEEKQLPGFRVLNWHFFFTAMLYTYGRFLSRQLVNTVTSDHLLYKVVSGLIKYQMFICYFLYIAGFVWFILTLKKKTYKYQFKQYAWTHMILLTVFAQSAFTVANIFEGIFWFLLPASLIVINDIFAYLFGFFLGRTPLIKLSPKKTWEGFIGASVTTIISAFLLANVMGHSQWLTCPRKDLLTGWLYCDPGPMFKPEHYSLGEWVPHWQGKAANSQGSIFCSTTRS

SEQ ID NO: 70725 - protein, 95 aa, Zea Mays
MSPRVHFVSLEKAPIVINMFFSFSQHWAAVEKHSSLDSQSSSIIFSTLSLSVSAIAHLLFIIQISLASSIFSFNLAISTLCGSPYASICALRLAI

SEQ ID NO: 70726 - protein, 220 aa, Zea Mays
MRGLHRCPHQLLLVSPPPRSAPACRQSATASSRGLRSSLAVFSAPGARVAAAAREQKWGHVEGDEDGGEEGLGEALHRTRELVECAMFAAVAGLAYFLSNSLAIENYFSCFFPLPIVISSLRWGLEASRKTVVATVLLLFTLSGPVKASTYLLMHGVVGLIMGTVWRLETNWIVSIILCSILLLNCGFFVFLLHVMYTVFLAKLGIKPSLRSPRWLDRVM

SEQ ID NO: 70727 - protein, 679 aa, Zea Mays
MAAVHGRVLLLLLSTLTFLAVHAVTAAAATATSCAPRTCGNLTIAYPFWLPVPDQQASSSSLPPCGPSAFQVDCRGGRASLARSFRGAYKILRVSYADRTVVVANDNVQTDASGCPVPRIDVSASLSLAPFTASGANAQLVFLFNCSKPPPAGFVNVTCPGAQAVVRLDPRYNTTDARAVAGACDYSVVPVLVSPGGGASAGDYPRLLRGGYLLEWRASPGNCTACNASGGQCGYDSDTDAFACLCDDGSSHPARCGAKKSDRKVILIVSVSIAFGLLLALLVLILKFHRQITRSFSFLLDRSSSGDTADVEKLLQKYGSLAPKRYRYAELKRITKSFQRKLGEGGYGAVYSGVLAAGAGGTRAREVAVKVLHHARPNGEEFLNEVVSIGRTSHVNIVTLLGFCLEGSKRALVYEYMPNGSLDRYIRSESDPAGTAALGWEALQEIAAGIARGLEYLHEGCNTRIIHFDIKPQNVLLDADFRPKIADFGMAKLCNPKESILSMADARGTIGFIAPEVFSRGFGVISTKSDVYSYGMLLLEMVGGRSNAKACAADKSSGGELFFPLWVYDHLLLEDGVGVLRGGGGGGAGGSGEAAAGEEIARKMALIGLWCIQTVPASRPSMSRVLEMLERSVHDLAIPPRPYHTSPSNSPSPSHPSSYPSSTSDFTQRSRLRTPESTG

SEQ ID NO: 70728 - protein, 56 aa, Zea Mays
MMEIVETVETLANNALLVQCTYVAMTHQLYLMVWCNDYTIHNGLMASQCDGPSHKK

SEQ ID NO: 70729 - protein, 575 aa, Zea Mays
MGADSPPSSSSTAPVAGVGAKNTVKQYHRIVVGFLLGFFVVLVLYTTLSSQFGSRTAIVLSWYTHAGVLQSLSAVRTDQATGAAPPLPSSNTPSNLAQEEDGGHKNDKPNKTEEEHIQDDAHRIGKNNQSEAKLEKTGQPAANDASDRMEEELIRQEIDQGSNKNDTIMEPAATAPRKPICDLSDPRYDICEISGDARTMGANRTVLYVPPVGELGSDGQEWSIRDQSRKHLEFVNKVTVKSLNASQSLAAPECTSRHAVRALVFAMNGLTSNPWHDFSDVLIPLFITTRALEGEVQFLVSDLQPWFVDKYRLVLKNLSRYDIIDFNQDGGVRCYPHVTVGLRSHRDLGIDPARAPRNYTMLDFRLYIREIYRLPSAGVSIPYKEANSNAAAAAPGAPAEQLQRKPRLMLINRGRTRKFVNFPEIVGAVQKAGFEVIPIEPRRDLSVEDFARTVDSCDVLMGAHGAGLTNFFFLRTNAVMLQVVPWGHMEHPSMAFYGGPAKEMRLRDVEYSIADVESTLYDKYGKDNPVVSDPESIHKQGWQLGMRYYWIEQDIRLNVTRFAPTLQKVLQMIRE

SEQ ID NO: 70730 - protein, 450 aa, Zea Mays
MRVILRLPAPSWMVSPGLDWNLCAITENRRDSIAVTFNDAKITCLEFDDSINGLRTSSMHCFEGPEWFHLKRGRESFAWGPIIKGDPQGRCGAVLVYGLQIIILKAAQVGQSLVGEDEPTRVLSSTAVRIESSYVIDLRDLEMNHIKDFTFVHGYIEPVLVILHEREPTWAGRISSKSQTCMLSAFSISMGLKQHPMIWSAAKLPHDAYQLLAVPPPISGILVICANSIHYHSQSTSCSLALNSFSSQPDGSPEILKTSFHVELDVAKATWLSHDIVMFSSKNGEILLLTVVYDGRAVQRLDLMKSKASVLSSGATTLGSSFIFLGSRLADSLLVQFSCGMPTSVLPDLTDEPADIESDLPFSKRLKRIPSDVLQDVTSVEELSFHNKAVPNIVDSAEKISFVVRDALINVGPLKDFAYGLRTNSDPNAAGIAKQSNYELFLKSREAIEK

SEQ ID NO: 70731 - protein, 956 aa, Zea Mays
MPSQVMDPRRHLSQFSNPTVAASSFSEEQFRLPTERQVGFWKQESLHHIGSKSVASSPIEKPQPIGTKTVGRVEPQPYKLRDQKTAFSLEHKTFGQERHVNLPPSLWRADQDPNLQSDPSLFPDGRRTSPNEAYNENGLFSSSLSEIFDRKLGLRSMDVRLRQPVQKVDLTHVDDEPFELTEEIEAQIIGNILPDDDDLLSDVLDVGYTAHANMGDDVDDDIFYTGGGMELETDENKKNTELNGANDGLGLLNGTMNGEHPYGEHPSRTLFVRNINSSVEDSELKLLFENYGEISNLYTACKHRGFVMISYYDIRSAWNAMRALQNKPLRRRKLDIHYSIPKIRDAPQKGHHKIIEFYDVRAAEGAARALNRSDLAGKKIKLETGRLSGARRSTQHMSKELGQEEFGVCKLGSPSTNSPSLPSLGSSNIAAMTSCGRENGSMHGLHSGLLTSMSPFREASFLGLSSTLPQSLSSPIGIASAATHSNQAPLGELSHSLSRMNGHVNYGFQGLGAIHPHSLPDVHNGANNGTPYNLNTITPVGVNKNSRTAEAVDSRHLHKVGSGNLNGHSFDRAGEGAMGFSRSGSGHNCGHQLMWNNSNNFHGHPNSPVLWQNPGSFVNNVPSRPPAQMHGVPRAPSHMIENVLPMHHHHVGSAPAINPSLWDRRHGYAGDLTEASSFHPGSVGSMGFPGSPQLHGLELNSIFSHTGGSRMDPTVSSAQISAPSQQRGPMFHGRNPMVPLPSFDSPGERMRSRRNDSGVNQSDNKRQYELDVDRIMRGEDSRTTLMIKNIPNKYTSKMLLAAIDESHKGTYDFIYLPIDFKNKCNVGYAFINMTNPQHIIPFYQSFNGKKWEKFNSEKVASLAYARIQGKTALIAHFQNSSLMNEDKRCRPILFHSDGPNAGDQEPFPMGSNIRARSGRSRTSSGEENHHDIQTVLTNGDTSSNGADNSGPTKDTE

SEQ ID NO: 70732 - protein, 301 aa, Zea Mays
MPQSATYRLSYLILDLIVWWGSRGFINDFRKKLNLPPIAYFSTYHGSISHLPTGYMWSPQLMPKPKDWGPLVDVVGYCFLNLGTKYQPPPQLSQWLQQGPKPIYIGFGSMPLDDEKKVTAIILDALRETGQRGIISRGWGALGSFSEVPVDVFILEDCPHDWLFPRCAAVVHHGGAGTTAAGLIAGCPTTVVPFFGDQFFWGERVHARGVGPAPISIAELTVEALSNAIIFMLDPEVKSRTMELAIAIGNEDGVAAAVDAFHRHLPSELPLSPPAHVEEERTDFFQWFSRGLEKCCFPFSF

SEQ ID NO: 70733 - protein, 964 aa, Zea Mays
MESGAMVLGVVRPEESPDRNGGGPRDDLGPSQMQVDGPVVLNQSAELVSDDSMAVDDVPVQQPSGQPVEATQQSPATLIDTIMEVQKQLKRKRASNSPVIDAADKDALVAGCRQELEGLFQYYKEVSDRKMQLDGGNLSFNGMVGCLLEESSLGLTRLVDEIYQQLKGLEGVSVASVRSSVLLAGQRMMYGNSSLDADVLEDESESALWCWEIRDLRLLPVKVRSILSTRRSVRKKIHERITAIYSTLSVLENSGAYIQVNDLKKASLKLNKSLNLEGIRSMVERATQKNTERGVKDAVSAVKELMQETDKNDQNVRRLEDTSVSEPQNGNSLGNEKEIQKAQKQVEKEIKRQEKEEAQMRKLQKKQQEEALREQKRHEKEEAEAKKQQKKQEDEALKEQKRREKEEAEAKKQQKKQEEEVLKEQKRREKEEAEMKKQQKKQQDEAEKEQKRLEKEAAQLKKQLVIQKQASMMERFFKSKKDNGKHQKPGENNSAEDPCNDNKETIPATTSKIDSSLYQQEGWVLDDLRRLQVTGWKKLSSYNRSSRWGTRCKPKMEAFKELKLQKSSDDMVDEILSTPNEDGGRNPIQENEHDKLESDIDMIQASEMQCHGASNPKPLQTRLIRMKLLQFDKSNRPAYYGSWRKKSPRCPFKMDPDLDYEVDSDDEWEEEDPGESLSDCEKDNDEFMEEDSKITDEEDEDSFVVPDGYLSDNEGIQIESLLDDKEEEANSSPNGQCTEVEEFRSLLRQQRVLNTLTEQALRKSQPLIICNLNHEKAELLTAEDLKGTEKIEQLCLQVLSMRICPGGAIVDVPLTDSSSATVEEINQPNVKNGSPEAASAIPETDLPEFVQVIRSCRDGIHKVVELLQHKFPNVPKTQLNRKVREISDFIDNHWKVKKEILDKLGLDSSPVKPKKNKSIAMYFSKRCLPPEEAVNALAASPELRLKSRNGGREAPQINLFPSEQ

SEQ ID NO: 70734 - protein, 525 aa, Zea Mays
MGASSSTGNPSPEAHEQREQETLASAALSLPLLRAAFSRSAANALPDALAPPPASFRLPGSPAPPPPHFHGILGGLGPAIASQFFGHGAAAVTDGGAGWVQFLRGFNRCCARVTASRSLALLLRVYAAACAGAGAPCGVQLQPDEGGGDEDGKVVGELAPEEIAVFLWVCWVMAWSASASRVVSDGGDKSEPVTVLLPDVTHLVLSALVSAGVVTDDAGVWGWDVSSGGKGVKVQEFMSWVLSTPFGLGNCLSRYVRDKFRSLAADSVEESSVSTVSTTFDTSDVYLLTRGRAWAIALSLRNKLSEKLLSASVIGMDTEDLLYRSSVHGKGLSRFWSCVEGYKGPMLILLSAFSKGGGENVDSDRRWVIGVLTEEGFENKDTFYGSSGFLCAAHPIFRMLPPSGKEKNFMYCHLHPQIRAYEANPKPVGLAFGGTIGNERIFLDEDFSGVLGYLPVEASVLDVEVWGLGGEATKRQQNMYKKREDIFSEQRRKVDLKTFASWEDSPEKMMMDMMSDPNTVRREDR

SEQ ID NO: 70735 - protein, 483 aa, Zea Mays
MGGCRELPIPEHMDIYHLTHEIEASDMSALQAVVCCDEERMKLEKEAEILAAQDDGGGDALDRVYERLEAIDASTAEKRAAEILYGLGFNKQMQAKKTRDFSGGWRMRIALARALFMNPTILLLDEPTNHLDLEACVWLEETLKKFDRILVVISHSQDFLNGVCTNIIHMQNKKLKLYTGNYDQYIQTRSELEENQMKQFRWEQEQIASMKEYIARFGHGSAKLARQAQSKEKTLAKMERGGLTEKVVRDKILVFRFTNVGKLPPPVLQFVEVTFGYTPDNLLYKKLDFGVDLDSRIALVGPNGAGKSTLLKLMTGELVPLDGMVRRHNHLRIAQFHQHLAEKLDLDMSALQYMMKEYPGNEEERMRAAVGKFGLSGKAQVMPMRNLSDGQRSRVIFAWLAYRQPQLLLLDEPTNHLDIETIDSLAEALNEWDGGLVLVSHDFRLINQVAHEIWVCENQAVTRWEGDIMDFKEHLRSKACLSD

SEQ ID NO: 70736 - protein, 1772 aa, Zea Mays
MAESEDATAAEPGSGPPHEDEDALLARAHTVISRIIDRELDPNPRLLHTLATMCELHEARYLELRSADTMFNSTNTRTAFTIGKLANLLRDNDEFYELVFCKFLSDTSYSVAVRAATARLLLSCHPAWTPPYPHVFEDSIIDNIKKWVTEDPEASNECKWKYLGNNKPTDAEMLRTYGIGLLAMALCSSGQLIEDVLTLGVSAKLMRYLRIRVLGDASSSQRDANHPQDTKHPWGGDDSRGKSRLSQDGSRLDGTRVGYGMLTNPTAEKNNEPCVGMMQAYGARSLDDSFASLDDSDVPEADWTNDRSYSTRVCDTKSKHGERNSVTRLLKDEEVSENGELLKRKLNRAPSRLRVKGKAGDSLPECEMTPLSPTSGLRIGGQATRDRNVARVDDPKEATDVNNRLFNTISKEEYEDRFRDCIIGLKDISDIVLKAVRAAEAEARSANAPDEAVKAAGDAAAELVKFAALEVWKSENNSDAVVVVAEKAASAVVEAALSISVSRSANQVGEERAMEEAVQTSEDQDLENFVISDKAQLLQLRENYSIQCLQILGEYVEALGPVLHEKGVDVCLTLLQRSMKNQEGCDHFAQLLDVLKLVCALAAHRKFAALFVDRGGIQKIVSMPRVTQTYMGLSACLFTFGSLQSTIERVCALSSDTLDSVVELALLLLECPQDLARKNVAIFFAAAFVFKAVLDLFDARNGMQKLLDILCGCASGRSGSNSGGAGSSNVNQGNDRSPAEVLTASEKQVAYHTCVALRQYFRAHLLQLVDSIRPSKSIRSIARNTSSARAGCKPFDISNEAMDAIFCQIQRDRKLGLALVRACWLALDKFVASNGHMTMLELCKFQAHGDRYLRDLTQYAIGVLHIITLMPQPHVRKSIVQGTLSNNRAGMAVLLDTVKSLDYIDHEVICPALNVLVNLVCPPPSISNKPLSSSNQQPAAAQALASESREKNFEKTISDRNLLTNLGESRERSGDGNPAEKNNTLHQGTPSTPVVPSGVVGDRRIMLGVGGGGPGLAAQLEQGYRQAREVVRANNGIKILLQLLGSRMVTHPVAIDSIRALACRVLLGLARDDTIAHILTKLQVGKKLSELIRDISAQTSGGDSGRWQTELTQVAIELIGVLTNSGKETTLAATDAAAPALRRIERAGIAAAAPISYHSRELMQLIHEHLLGSGFAATAAMLQKEAGLAPLPLTAAVLPAHQVAALEASSVQQQWPSGHVQGFLSDKINTSTYQSAQRSDPKLPSSKKKALAFSSSFSRRARSPHPSNILKSPVPIAADTGDAEMLNKAPLSLPLKRNFVDVKDISFASASKRLAITDQIYQSSAFQTPAPTRKGLSVSVDSPTSSHCGWTNFNNAFTENLDNSQGTPGALTTTALPGVNDQQSGNLERMTLDSLVVQYLKHQHRQCPAPVTTLPPLSLLHPHVCPEPSRSLSAPANIAARVGSREISRQFSGIQIPRRDRHFIYSRFKQCRVCRDEASLLTCLTFLGDAARVVAGNHTGELRIFDCNTANLLETQTCHQHLVTMMESTYTGGIEMILTSSLNEVKIWDAFSVSAGPLHTFDDCKSARFNHYGTSFAALSTDTAQREVQLYDVQTYTLATRLPDNTSSSGSGRGYVQPIIHFSPSDTMLLWNGVLWDTRQPNPVHQFDQFTDYCGGGFHPAGNEVILNSEVWDLRKFKLLRSVPSLDQTVIKFNGTGDVIYATLRRNLDDVTSCINARRVRHPLFPAFSTIDAMFVAWAWQKLTPQAAHQLLEQIIKGYTGKKHKGLKNVPK

SEQ ID NO: 70737 - protein, 112 aa, Zea Mays
MEFTREYFTAAVRGGNSRDSIAQRGGGLEDQRLHDHVHVDSHPQAYAGPSTGENYESTCCMFARETARQQLDEIEFIPFQSNSGQQSISQVISPTATNLIPIHNLHKSSWSP

SEQ ID NO: 70738 - protein, 162 aa, Zea Mays
MNSVPKPAPGSETSGREDFAVGDKDAVVIVDHGSRRQESNLMLNDFVEMFRAKTSYRIVEPAHMASREEGELQGSEKEESCGEGGELLTAEREIDICAGASGAYYKGCFWKMCATRSIPSYYQSIFPFPWTTLEARHSCFSSSGIKGALKYTLYCHCPSWAA

SEQ ID NO: 70739 - protein, 69 aa, Zea Mays
MLCLFCDHLVMARTESRHRGTSAAGSLTVDRSTGVIPGQSRARTETLEGDEEYSRCFGGWRAFPVLGED

SEQ ID NO: 70740 - protein, 134 aa, Zea Mays
MAAWATARGADPFIFLEESVSAANSRAREAVNPSRRLCMCICCRLPSCTRARPLAQSAARRAPSAVLSPARRANTETPTRPAQSAERRADAAQSAERRADAAQSAAPPWRLGATAELICQSVISPRPSRRPLRT

SEQ ID NO: 70741 - protein, 56 aa, Zea Mays
MMLQPSNRREKPWSCGNCSPYLELTAEPQRCVAELLHKSTAGERPPKHILNPILYA

SEQ ID NO: 70742 - protein, 359 aa, Zea Mays
MDYGPSDSSGTDDDLPQLPHRSIRGSGRVSGNGRTIVPAGSYARAPTDMEAQIQQLEQEAYCSVLRAFKAQSDAITWEKEGLMTELRKELRVSDKAHRELLNKVNNDNIICSIREWRSTGGLQASMSNNPQPIHDPVPSPTTSGRKRQKTSQSVPALPAPPAMHSQQLATPTQPSSSTARKAVPPVPKGKKTKPGQKVPGGSAAKPMPSSAGPSGRGPHMNRNFPGGSAPEAQAQNVDPLVGRKVMSRWPEDNSFYEAVISDYNAETMGPEDIRWKEDDSGIDPVVYLRSRGAPSSGVRKPTGRGGPMPGSGRGRGLPKNMSRKDFPPPQNGVGKRSSDDIDILHTESLIKEVECLLLQ

SEQ ID NO: 70743 - protein, 135 aa, Zea Mays
MGSLWVLHPFPFAYNNIVVPRCRLCSAPSHRPPTPTAPRFPDPDPKHHKDLRTCSSSKCSTNLASPTSRQVVRPVLEFGGVPSLHAVDSLLASLRCHRSLSSSSSSTSPVLAPNWPSCSTCFPPCRFACTFHSIR

SEQ ID NO: 70744 - protein, 271 aa, Zea Mays
MSLVTSSISEAKSEGVFFAVKEVNLFDKGSNAKQCIFQLEQEIALLSQFEHENIVQYYGTDKEDSKLYIFLELVTQGSLALLYQKYRLRDTQVSAYTRQILNGLIYLHERNIVHRDIKCANILVHANGSVKLADFGLAKEITKFNELKSCKGTVYWMAPEVVNPQQTYGPAADIWSLGCTVLEMLTRQIPYPDLEWAQALYRIGKGESPAIPNTLSRDARDFISRCVKPNPEDRPSASKLLEHPFVNKSIRSVRSMRTTPSRSNSSTRGIN

SEQ ID NO: 70745 - protein, 423 aa, Zea Mays
MYHKNPDAAKRIHQEHEVLAKQKALILVGETLLLSTIRFDFNIHHPYEPLKLALKKLGIAETELRQSAMSLINDTLPSTLVIQFKPQYIAAASLWFAAKFHNVNLSQNGTIWWHVFDVAPDPLRVVVQQMSELFEKRAPCSVGPVTKPVPASSATDKHQIKPAPTHTPMDKHQIKQVPAPMNRHQIKPVPTPTPMDKHHIKQIPAPAPTCRHHIKPVPTPIPTPMDKQQNKLAPTPMDKQQNKLAPTPMDKQQNKPAAAPAPTDRCQRVSTPVPAPRDTQSSRRSFSSSSNTEAPRRVPAGRSSNEKPRDRSPRHEGHWCRGKDGENQHCQKHRDHNSEQRPEERSNQRALKSGLAYLVRSGGPKDTGAATEIRNLTRRKRRIQEVGGLPTPVYTSDTDAWRQVSAVVLFGTKGQKRPRGDEP

SEQ ID NO: 70746 - protein, 518 aa, Zea Mays
MDACSLVHCHLPRPLQLPLLAPPTPSRHRPRVASALVCCCCPAAAADHHQERPWEWYDRAIQSHAGSDLARSLGLLADMQASGGRPSGSAYARLIRALSRAGRALEAEALLLEMRRLGPRPEAAHYNALLEGLLAAAHLRLADLLLLQMADDGVARNRRTYTLLLGAYARAGRLEDSWWVLGEMRRWGIRLDTAGYSMLVRLYRDNGMWKKATDLVMEMQEVGVELDVKIYSGLIDTFGKYGQLADARRMFDKMRAEGVRPDISTWNALIQWHCRVGNMKRALRFFTSMQEEGMYPDPKIFVMIISRLGEQGKWDEIKKLFDGMNNRGFKESGAVYAILVDIYGQYGHFRDAQDCIAALRAENTQLLPRVFCVIANAYAQQGLCEQTVNVLQLMEEEGFEPNLVMLNSLINAFGTAGRHLEALAVFQHIKDSGMSPDVVTYTTLMKTFMRAKKFEKVSIEFGIIAVVIGPLSMHMIMYWFSSRLKHYACEDLDGYGIKPITLSKAPECLYVDQKSEKG

SEQ ID NO: 70747 - protein, 491 aa, Zea Mays
MDSTALQYENQKLVQQLEVQKSEMHALERKFKELSDDQCSYDKTLISLNKLWNQLIDDLVLLGVRAGGDLDNLQALDHEELSEESLESCPSEEIFLLRLLKTNNIRDNSDTSLLKFVEEALAFRSSATVTLMKSLQETISSQQARSESLSLALNGQKSNEDVIVALRNHNDCLKEVAENASQAISIINEKHKRYLDEIEAFKSNHSRELQEIKRISGELEESIAELEESQRKLVVLQLQRHGSVMDASGANAVNGGISTHKSSDKSMSWQDLKDAVDAAKTLAGNRLLELHQTQEDNLILSKELGDLEGQLKDEKYVLVSKPYMILNDKLQHLNAEIERYRGLVEVLQNDKDQLMQREKEISAKAESLDSVKQTIITYEKKIEELETQIQILFSEKNDLETKVEETLQDSGKKDFKNEIHVMAAALSNELGMMENQLSRSKDAASEALALREQAESLRSLVAKKIEEHKKISDKYNSQVIEIKSLKALDNC

SEQ ID NO: 70748 - protein, 106 aa, Zea Mays
MLAWAVAGGKDRDGVVGGRGGAWQDGAHCGGAGASGRGTRDAYHRLRGACAAQDLFSRRGCTRSSRISGSLWGFAIPRPPSLTGSCLLSARFCKLSVIYTHSCAVY

SEQ ID NO: 70749 - protein, 270 aa, Zea Mays
MDSFRKGAFCNRGKEQRQLYCLLSCCGNSSQGEAGFFLAHQLISRALTIPGTSVHWYAKPEMRKQRKMGHITIVGPSKISVKSRLDNLLQRNSSDPKEVSPRVAIIMGSQSDLPVMKDAERVLKEFDIPCELTIVSAHRTPERMYDYAKSAKDRGFEVIIAGAGGAAHLPGMVASLTPLPVIGVPIKTSTLSGFDSLLSIVQMPKGIPVATVAIGIAENAGLLAARILAARDPELQDRVTKYQDDLRDMVLETAERLEDQGPEEFLKGMD

SEQ ID NO: 70750 - protein, 812 aa, Zea Mays
MSERLFKFPLSDNLCAALFSVLSGTSAQQVPQENSEPDPSRDRNCNILSLPPFSLPQILICIFRFMHSCKDSSARTRILNLLLGLLDSNSSNIEALMEHSWNSWLETSTKLEVFKDYKSVSKGDPDDVKADEISLVRNLYSLVLSYYLRFVRGGWHQLDDTANYFLLKTDQGQLSCSDLLRDILDDIAGSLLHKSVEDNIFLLQPCCDNVLHFLNLIQELLISQMGIRLLFLSPSISEESSHDNIWKEDIKSTVNDILNTESHGQFTRFSDVNEVSDDWWSFFDKVWSIIRNLNGKGPSKFIPKDPNVEVASLGQRARGLVESMNVPAAEKVAVVSGGGGIGTALGIKVNRFAEKATTSREEIIPRIFFHLVILYLCKAGLENASKCVIQFMSLLPILLISEDDQSKNKLHFLIWSLLIVRSQYGQLDDSARFHVFSHLILETIIYGKSMLVTNILERDDSVDVNNKETGFILSFIQKNRVLAAAANEVKHMKAVQADRLKKLQDLRMKLNECSATEIKLAQAIEDEIHLTITAVLSADDNRKTACQLAFREDQQIIRDKWIHISRALMDERGPWSANPFPNDVVTHWKLDKTEDRWRRRFKFKRNYKFDERLCQPSQSRNESTATLADQLYISAKITQKMKQFLVKGVRGITEDSSYEQFEDTNDASESSQSNPSESQNLNNAADTSDHHASAHYKKEPSSTNGDNDYTKVLCSVRCVFVTPKRKLAGQLDITRTVMHFSFEFLVEGTGGSSVFSKFKDKKDSDCKNELGGVDRLDGCRDSMIETNGVLMQNQSNKIKRHKRWNITKASWT

SEQ ID NO: 70751 - protein, 180 aa, Zea Mays
MIASESIGVGDIALEIPESLIISDELLCQSEVFLSLKDFNNITSETMLLLWSMRERYNLGSKFKPYFDTLPANFNTGLSFGIDALAALEGTLLFDEIIQARQHLRQQYDELFPLLCTNFPEIFRKDVCTWDDFLWACELWYSNSMMIVLSSGKLSTCLVPVAGLLNHSVCSSAPLEVFFY

SEQ ID NO: 70752 - protein, 784 aa, Zea Mays
MACHLSPLFNLRLLLLLGAVLGNAVLVRAGGAEASDRAEPDPYSILTWHDYSPPSPPLPPPDPASSTATCEGDLHGKGDFRTHCEVFEEVELGDDIYITGNGSLVLLSGASLTCEKVGCVISANLSGEVHLSRGVRVRAGRVSLVATNITVADTVVVNTTALAGAPPDRTSGVPTGTHGDGGGHGGRGASCFVKEGQTQEDSWGGDAYAWSDLEHPWSYGSKGGSTSVEKDYGGAGGGIVWLFADDLVMNGTVLAAGGDSNEKGGGGSGGSIFIRAASMYGGGKISASGGDGLAGGGGGRVSINVFSRHDDTQIFVHGGRSSGCPDNAGAAGTLYEAVPKSLIVSNNNLSTQTDTLLLEFPNQPLWTNVFVRNRAKVAVPLLWSRVQVQGQLSLLSGAILTFGLTGYPYSEFELMAEELLMSDSIIKVFGALRMSVKMLLMWNSRMEIDGGGDSIVATSLLDASNLIVLKESSVIHSNANLGVRGQGVLNLSGDGDTIEAQRLILSLFYSIQVGPGSVLRGPLVNRSSDDVAPKLNCEADSCPVEIIHPPEDCNLNSSLSFTLQVCRVEDIDVWGVVQGTVIHFNRARSVTVHTSGTISATGFGCRSGVGQGKMLRSGVCGGGGHGGKGGNGFYKGDLAEGGAIYGNADLPCELGSGSGNDSTELSTAGGGIIVMGSWDYSLPSLALYGSVESNGGSYASGSVGGPGGGSGGTILLFVHTLSLAESSVLSSVGGFGSTGSGGGGGGRIHFHWSNIPTGDEYVPVAAVKGSILTRVLGLLSKVLC

SEQ ID NO: 70753 - protein, 254 aa, Zea Mays
MTGVVVDIGDGAPQIVPVVNGYVIGSSIKSFPSSGSDVTQFISQLLQERGELLAPEDSLDISRKVKEVYCYTCSDIVKEFKKHDKKPDKYIKHWSAVKPKTGVPYTIDIGYERFLGPEIFFNPEIYSADFSTPLPELIDNCVQSAPIDTRRALYKNIVLSGGSTMFKDFHKRLQTDIKKIVDDRVAATNARHRVEVRPIEVNVVAHPIQSYAVWFGGSVAASNPEFFEFCHTKEEYEEHGASICRTSPVFKGMY

SEQ ID NO: 70754 - protein, 351 aa, Zea Mays
MSFTGSAPVVRIISLEFRRGRARRMVSKMRFRNALGSRPFQCCSRENHTYVRKLLDRVSERSKLLKKVSVLVGYSNPQDLVEKQRAPGESSAELISALKEIDFPEITAKFPCIKVGDASPVELYEDSTNMKFKEAALSEKLTNFIQGSARNLESAYEFHNDCHPLNQTPTTAGDLSISEEIPLIEPIVDTKSPESLSDAITSDNSILDKSIRCLPGTTSRQYRQLEDGGFHTVRKLLQHFPRTYADLQNPQGPIEYGQYIMLSGTVISSRGIKVKSTLGLLEVVVGCSIIESELSSSVESSHSGAEQKRIHLHLNRFFSGARFSSQHFLNLMSAKHKEGDLVYVSDKKGAC

SEQ ID NO: 70755 - protein, 1491 aa, Zea Mays
MANLGGGAEAHARFKQYEYRANSSLVLTTDSRPRDTHEPTGEPETLWGRIDPRSFGDRAVQNRPPELEEKLSKSRTKKSKRDAAAALDSADLPRRDAKRRRRAASAQEVSVLSLTDDAVYKPQTKETRAAYEALLSLIQQQLGGQPLDVLAGAADEVLATLKNDKVKNPDKKKDIEQLLNPISSQLFDQLVSIGKLITDFHDAAAGDASGAPSADAVDTTLDDDVGVAVEFEEDEDEESDFDQVQDELDEDEEDDMAELNGPGGMQMGGELDDDDMQNANQGLTVNVQDIDAYWLQRKISQAYGDGDIDAQQSQKLAEDILKIIAEGDDRDVENRLVMLLDYEKFDLIKLLLRNRLKIVWCTRLARAEDQEQRKNIEEEMASDPSLAPILEQLHATRASAKERQKNLEKSIRDEAKRLLNNDAAAAGADGARDHRAAEWDMESGWLKGQRQLLDLESLSFHQGGLFMANKKCELPTGSFRTPHKGYEEVHVPALKAKPYETGEKIVKISDMPEWARSAFDGMTQLNRVQSRVYDTALFKPDNILLCAPTGAGKTNVAVLTILQQIGLHMQDGEFDNTKYKIVYVAPMKALVAEVVGNLSKRLAGYNVTVRELSGDQNLTKQQIDETQIIVTTPEKWDIVTRKSGDRTYTQMVKLLIIDEIHLLHDNRGPVLESIVARTVRQIETTKENIRLVGLSATLPNYEDVALFLRVRKESLFYFDNSYRPCPLAQQYIGITVRKPLQRMQLMNEICYEKVMAAAGKHQVLIFVHSRKETAKTAKAIRDTALANDTVSRFLKNESASQEILGTHAELVKNNDLKDLLPYGFAIHHAGMARVDRELVEELFADKHIQVLVSTATLAWGVNLPAHTVIIKGTQIYNPEKGAWTELSPLDVMQMLGRAGRPQYDTHGEGIILTGHSELQFYLSLMNQQLPIESQFISKLADQLNAEIVLGTIQNAREACSWLGYTYLYIRMLRNPTLYGLPADILESDKTLDERRADLIHSAANLLDRNNLIKYDRKTGYFQVTDLGRIASYYYISHGTISTYNEYLKPTMGDIELCRLFSLSEEFKYVGVRLDEKMELAKLLDRVPIPVKESLEEPSAKINVLLQAYISRLKLEGLSLSSDMVYIRQSAGRLLRALFEIVLKRGWAQLAEKALNLCKMVDKQMWSVQTPLRQFTGIPKEILMKLEKKELAWERYYDLSSQEIGELIRYPKMGRPLHKCIHQLPKLNLSAHVQPITRTVLGFELTITPDFQWDDKVHGYVEPFWVIVEDNDGEYILHHEYFMLKKQYVDEDHTLNFTVPIYEPLPPQYFIRVVSDKWLGSQTILPVCFRHLILPEKYAPPTELLDLQPLPVSALRNARYEGLYSAFKHFNPIQTQVFTVLYNSDDSVLVAAPTGSGKTICAEFAILRNHQKALSGESNMRVVYIAPIEALAKERYRDWERKFGEFAKVVELTGETAADLKLLDKGEIIISTPEKWDALSRRWKQRKHIQQQ

SEQ ID NO: 70756 - protein, 101 aa, Zea Mays
MVFFSSCNSVKFHVELLNFFRIECFDIHGKQKQLKRTTTFFSFCKAGKGILLCTNVAARGLDTPDVKEGSVHVSSSSNEVTGTIPETNGGDHHIPGSSFHV

SEQ ID NO: 70757 - protein, 660 aa, Zea Mays
MPGIPGEVIEHHLKIYPNAKPVSQKPRRQSVERHDFIREEVQKLLHAGFIEDVHHPVWLTNPVIVPKANGKLRMCIDYTSLNKACPKDPYPLPRIDQIVDSTSGCDFLSFLDAYSGFHQIRMSREDRKHTAFVTVDGLYCYVVMPYGLKNALPTFVRAMSKTFGDLIRDKVEVYVDDIVVKTRRGSTVVEDLTLVFDKLRATRTKLNPEKCIFGVFAGKLLGFLVSYRGINPEKIKAIKIMRPPARVKDIQKLTGSLAALSRFISRLTERALPFFKLLRKSGPFAWTGEAEQAFRELKQHLTSLPILVAPDPGEMLYLYIAAAAEAVSMVLVAERATLEGQRPENSEPASGARTVQKPVYYVSEVLHEAKVRYLETHKLLYAVLVASRKLRHYFQAQRVVVVTSFPLRAILHNSNATGNITKWAAELAEFQPRHAIKSQVLADFIVEWTPPPYAPGGPDPEPGPTPAGRGGPVFTEHHWTLFFDGSTRQESAGAGVVLVGPDGDQLKYVVRLEFKATNNMEEYEALIFGLSTALSLGVRQLLVKGDSQLIIKQTRGECSCNEPRLAAYLLHVKKLEKDFAALELQHVPRADNSTTDDLSQRASTRAPAPEGAFKRRLLRPTARPAKLSEGGETGTSKPTVPMASQDPPKVVCALGGFTSP

SEQ ID NO: 70758 - protein, 151 aa, Zea Mays
MSPAAPQHKLREAIAMVDEVGPPEKPAMEPAPAAKQIMVPEKPEEMLRAQHMLTTLVDEVRPPEKPEETPENTSAGQPALLRYRPVSLCPPSTDRRRSGCPTPSYPRPRMLMSSAPPVPLPRRQRAPPSSSLAPRPDRRRRRAAGSTVLRF

SEQ ID NO: 70759 - protein, 767 aa, Zea Mays
MPEAARARGLREPAGEGEAEQEDEFYESLDRILSSSCSSASASDDDADHRRRRSRRHHLLHQHQHQHQPLSSAYDVWISEPTSVEERRRLLLQRLGLASDPPPRRSPSPPASTPASPPAPPEEPRSGAGLGSPPLTRNPSSSGGEQQCRIRNLDDGTEFEVGEVHEEEVVREVGTGRHLTFEEFELCVGRSPIVHELMKRTTTAASASASNHAAPAASKPRRKPGGGWLRGIRQLAGTVAYGRRGADDGDKEKEKEKKEREARRLSSATDDSLDGAGSRDVRRVQVRQYGKACKELTGLFMTQELAAHSGSVWCINFSLDGRYLATAGEDRVIHVWEVSEGDRKGELLGEGSLAKENGGGCSPFLTFLGNDSPEIAALSFTCADMDKKRRLRKQSNRKSVGSDHLVVPECVFGFRDKPVCSLLGHAADVLDLSWSKSQYLISSSMDKTVKLWDITTSTCLKTFSHTDYVTCIQFNPVDDNFFISGSLDEKVRIWSVRDRKIEDWNDLHEMVTAACYSPDGQGCCHIFDTSEKKLLYKSQIDLRIRKKKSGQKKITGFQFAPGSSSEVLITSADSRIRVVNGDEFVHKFKGLRNTSSQISASVAPNGKYIICASEDSHVYVWRHDNSSHPSRNRITVDVTNSYEHFHCHGVTVAVTWPGAEARGSFGSRSSRHSDSDGAVNSGRDIPAENSQHNSDAGTSRHPGDRASTSWPDEKLPSAKSSPGHCSSDLCIGAMDVQRRSAWGLVIVTAGRGGEIRVFQNFGFPVQV

SEQ ID NO: 70760 - protein, 3189 aa, Zea Mays
MNIVKGVADLLRKSTPASPGAGAGGGGGGGDRGGVGSPSADRLAAPPSPRVRFSDNGEEGVLNALWHKYESGIDKAEKKKTLQTFVMHFVKAFKDWEPGYIEQSIDHESLSDDTILGCSTGHPSEVILILIQEISQITSSITESSSCPESSANISELLGDLGLNAEGLTILECLTILTRSVHNCKVFSYYGGVQKVTALLKAAVVKLKTLTSLLAADEQLSNKTVENMRTMQKVLVYIVTIISNFMDLEPNTTRISQFILNSSRHTLSSNYLATVAPNTSKSMVFDRNWQKKAIVSVMEAGGVNWLVELLRVIRRLNLKEQWTDLSLHFITLYSLRSTISENVRAQNHFRSIGGLEVLLDGLGLPSSKFSVSKQSFVPSDERSGILQLQILYLEILREAVYPVPLFLSAYHQQKILNAQAILKADKESTGPSPTLESFSNPVDILDTSEWNEYSVKLSITLCSFLLPPKEIKYCPAPTDVTQISLSISLAYWEQCARWIIKVLSTVFPCMKACASETDLPNHIRILANTMQHYMLCTFRKVLISAPALLKSFREEGLWDLIFSEKFFYFGSSLDYIQQNDQLIDAPKSIDSKSFSETDVNVLQAEAISFLEFAATLNENSNNLPECLALVGALEHCTYDPGLAGGIVKSFHVILQLATEQTLASFKSIDVLTRVLKVACLQAQEIRKLSQDDLNQNGSQSRNAQTTYSDERIKNTCAFVKLAFNLFKEYATISDIGRITVLCNANCIECLFDLFQEEYLRKHILEQVLALFRLPSSSAQHHAAKMLLCSKYLETFTRAKEKEKAFAELSIDLLVNMREVIMIDRVYYQNLFRNGECFLHIVSLLNGTFDEAVGEQLVLNVLRTLTALLAENDESKAAFRLLVGAGYQTLQSLLLDFCKWIPSPKLLDALLDMLVDGTFDINEKATIKNEDVIMLLINVLQKSSTSLQHYGLMVLQQLLKGSITNRTSCFRAGLLSFLLDWFKVEKGNDIVMKIAEIIQIIGGHSICGKDIRKFFALLRDEEIIAKQQHSSLLLTSVSHMLKEKGPEAFFEFSGHDSGIEIKSSVQWPYNKGLSFCCWLRVESFPEKGLMGLYSFFTENGKGCLAMIGNNTLIYESVNPKHQCVLLSLSLPIKQWKFLCVTHTIGRTFSGGSQLRCYVDGDLVSSEKCRYTKVNELMTRCSVGTELMPIGEEPSSLGFENTLAFTGQMGPVYAFSDALSPEQIRGIYNLGPSYMYSFLGDQNLLTNDDSRYKGILDAKDGISSKMIFGLNAQASNNRTLFNVSSALDGLDKSKFEATTMGGTKLCSRRLLQEIIYCVGGVSVFFPLLIHFDDAVVQNGEFATRDQLAGQVIELVASVLDGNIANQQQMHLLSGFSILGFLFQSVSPQLLNIKTLSASKYMFTILKTSSMSDILLRDALSQFYLNPHIWAYATYQVQRELFLFLIQYFEADGKFLPVLCALPRIIDVIKQFYSEKLDPRFSKPLLVSKKVTGERPSMEEIRKIRLLLLSLAEMSLKLKVSQHDIRALVSFLERSQDVACVEDILHMIIRALSQNSLVPSFLEQVNSLGGCYIFINLLKREFEPIRLLGLQLLGKLLVGVPSEKRGPKIFGLPVGRPRSIAEDIRKGATAAPQLFFYSISDRLFKFPLSDHLCASLFDVLLGGASPKQVLQKRSQSDALKDRSMAPFFVPQILVCIFKYIQSCRDASVRTKILSDLLDLLDSNPVNVESLMEYGWSSWLETSAKLDVLRNYKSNSVAKADGLETNELILVRNMYSLVLSYCIFSVKGGWHQLEDTTNFLLLKIEQGQLPNSSMLRDIFEDLIGSLLETSSEESVFNSQPCRDNILYLLNLSHELFVDQIGIKLLFPSPDMSAHLSSDDINSAVLEIMNTEGNGLLTSLPWSNILFNDGEKLTDDWWSFFDKIWTLLCYLNGKGQTRLTPKGLNTAGPSIGQRARGLVESLNIPAAEMAAVVVTGGISSALGGKTNKVADKAMMLRGERFPRIIFHLIIMYLCKAGLENASKCVQQFISLLPNIISEDDQCKNRLHFLIWSLLRVRSQYGQLDDGARFHVMSHLILETVIYGKSMLTTNIVGRDDSTEANNSKEAGFILNLVQKDRVLTAATDEAKYMKDAIADRMKLVQELHSKLDERSIQDVEQLQSFEDDVQFAKTAAIAADDSRKAAFQLAFDEDQQIVADKWIHILRALSDERGPWSAAPFPNNIVTYWKLDKTEDKWRRRLKLKRNYKFDECLCHPSSIKSSNDNAAPTVDPSANAKITEKMKHLLLKGVRGITGDISSESCEDSNDMIDPPQNVPPENHTVSDTSDSADSSDYPAIVQNRKESSSTSSDNDYIEVLSSVHCVLVTPKRKLAGQLTITRNALHFSFEFLVEGTGGSSVFDRFHDKKDSDSKNEMGGVEKLKGNLDGGRGNAAESSDTQIKNQSGKIKHHRRWKITRIKAVHWTRYLLQYTATEIFFDDANAPVFLNFSSQNDAKSVGSLLVSLRNDALFPKGTTRDKNSLISFVDRKVALEMSESARESWRRREISNFEYLMILNTLAGRSYNDLTQYPIFPWILADYSSEKLDFNKSSTFRDLSKPVGALDAKRFKAFEDRYLNFVDPDIPSFYYGSHYSSMGIVLYYLLRLEPFTALHRNLQGGKFDHADRLFQSIESTYSNCLSNTSDVKELIPEFFYMPEFLENSNSYHLGIKQDGEPLGDVGLPPWAKGSPEEFIHISREALESEYVSSNLHHWIDLIFGYKQRGKPAVEAANIFYYLTYEGAVDLENMDDMLQKSAIEDQIANFGQTPIQIFRKKHPRRGPPIPIVHPLYFAPQSITVTSVVPTIVTPLSVLFIGLLDSNVVMMNEGLILSVKLWLTTQLQSGGNFTFSGSLEPFFGIGSDVISPRKIGTSLAENVEFGRQCLATVQIRGDNYLILCGNWENSFQIISLSDGKIVQSIRQHKDVVSCVAVSSDGSVIATGSYDTTVMIWYAFQGRSNDKRYRNANYDLSTKDHVIIESPCHILCGHDDIITCLFVSTELDIVISGSKDGTCMFHTLREGTYVRSIRHPSGAGLSKMVTSQHGRLVIYSDSDLSLHMYSINGKHIASSESNCRLNCMELSCCGEFMVCAGDHGQIVLRSMHSLDVVWRYEGAGKTITSLVVTPEECFLAGTKDGSLIVFSIENPLLRKNAMQRHKAKPSIGG

SEQ ID NO: 70761 - protein, 1061 aa, Zea Mays
MEQEEYTREEINWSYIEFVDNQDVLDLIEKKGGLIALLDEACMFPRSTHETFAQKLYTTFKNNKRFAKPKLSRTDFTVVHYAGDVTYQADYFLDKNKDYVVAEHQDLLNASSCLFVAGLFPPLPQETAKSSKFSSIGSRFKLQLQSLMETLSSTEPHYIRCVKPNNLLKPAIFENTNVIQQLRCGGVLEAIRISCAGYPTRKTFYEFVNRFGVLAPEVLEGSNDDKIACQKILEKMGLENYQIGKTKVFLRAGQMADLDARRAEVLGRAARIIQRQIRTYIARKQFAELKRSATQLQSFVRGTLARKLYECMRQEAAAVKIQKNMRRHKARESYLQLQAAAITLQTGLRAMSARKEFRFRKETKAAVHIQAQWRRHRDYSHYKNLQGAALTYQCAWRQRLARRELRKLKMAARETGALKEAKDKLEKRVEELTWRLGLEKRLRTDLEEAKAQEIAKLQETLHDMQLQVEESKAMVVKEREAARKAIEEAPPVIKETPVLVEDTEKINSLTTEVEQLKALLLTERQATEAAKREHAESELRNEELIKKFESAEKKIEQLQETVHRLEEKATNMESENKVLRQQAVAISPTSKSLAAYPKSPFQLKTPENGNALNGEVKSSPDITPILPNPKELEAEEKPQKSLNEKQQENQDLLIKCVSQDLGFSSGKPIAACLIYRCLLHWRSFEVERTGVFDRIIQTIGSAIESQDNNDKLAYWLSNSSTLLLLLQRTLKTTGAAGFTPQRRRSSAASFGRVFSGMRASPQSAGRAFMGSRLIGGLGDLRQVEAKYPALLFKQQLTAFLEKIYGMIRDNLKKEISPLLGLCIQAPRTSRASLIKGSRSQANALAQQTLIAHWQSIVKILTNYLNVLKANYVPSVLISKVFTQIFSFINVQLFNSLLLRRECCSFSNGEYVKAGLAELEQWCIYATEEYAGSSWEELKHIRQAVGFLVIHQKPKKTLKEITNDLCPVLSIQQLYRISTMYWDDKYGTHTVSSDVISSMRVMMTEDSNNAVSSSFLLDDDSSIPFSVDDISKSMTEIEVTDVDMPPLIRENSGFTFLHQRKD

SEQ ID NO: 70762 - protein, 277 aa, Zea Mays
MPVRRRQPRRPETGAAERYREMGIGAALSRPWDYPTACGELAALLRLGYADLPKAAQALVASDVLLAFRLLPDVQTGYAVSTANVLLQAVEVALPKQKKAQAVSEFKHSIIAHKRRARVQQISGSPHIPQDILVHIFSFLDMHSLVAAGLVCWSWNSAANDNKLWKMNYSIFFGLSHLSCNNIPVSGVQYSTNSVPNYPNFSWKESFHTKYAECASWKFVSNRALCAHCRSVIWLSNLTCASPHHCPKNRHHEVKLRPLLPDTSWIRLLNTYCALKI

SEQ ID NO: 70763 - protein, 574 aa, Zea Mays
MASASTAVRMLPDGGADDEERWLAEGIAGVQQNAFYMHRALDSNNLKDALKYSAQMLSELRTSRLSPHKYYELYMRAFDEMKKLEMFFREETRRGSCSVVDMYELVQHAGNVLPRLYLLCTVGSVYIKSKEAPAKDVLKDLVEMCRGIQHPLRGLFLRSYLSQISRDKLPDIGSEYEGDAETINDAVEFVLQNFIEMNKLWVRMQHLGPAREKEKRGKERNELRDLVGKNLHVLSQIEGVDLDMYKETVLPRILEQVVNCKDDLAQFYLMDCIIQVFPDEYHLQTLETLLNAFPQLQPSVDIKTVLSQLMDRLSNYAASSPEVLPEFLQVEAFAKFSNAIGKVIEAQPDMPVVGAVTLYVSLLTFTLRVHPDRLDYVDQVLGACVKKLSGKAKLEDSRATKQIVALLSAPLEKYSNIVTALELSNYPRVMDYLDNATTKVMAVVIIQSIMKNTTCISTSDKIEALFDLIKGLIKDMDGAQDDELDEEDFKEEQNSVARLIHMLHNDEPEEMLKILCTVQKHILQGGPKRLTFTVPSLVFSALKLVRRLQSQDGDVTGEDVPATPKKIFQILHQS

SEQ ID NO: 70764 - protein, 73 aa, Zea Mays
MSSSSSIPPPPVSAQRSTSTTHLVVYIFVLWSSSIEKNPHRQVVYLLQAGVCDRVRQPGRYGLWAHVVLNGAG

SEQ ID NO: 70765 - protein, 306 aa, Zea Mays
MARKCSHCGNYGHNSRTCGLGLGLGHREIMLCEGGDDNNGRSGLRLFGVQVRIGGGGGAGSASMKKSYSMDCLQLAAPHACSSLVSSPSSSSLCSSSSPSSLLLSIDDGLQRGAADGYLSDGPHGRAVQERKKGVPWSEEEHRQFLAGLDKLGKGDWRGIARSYVPTRTPTQVASHAQKFFLRQSSMGKKKRRSSLFDMRQVPICENSASISDPLDVARHGVASADSERAAVDVDLMNSTTEGDDGRSRDVVSSASGAGTALRFPAAAAQTEPLHPSSSHGHGRGHHCSPLDLELGMSLPAPSVGT

SEQ ID NO: 70766 - protein, 284 aa, Zea Mays
MHIAINAVITELKQFLRASVTIAMEAGRMDQPCMASINSQPFVADTEPVKKASGDMPAAPTGSGCFDCNICLDFAAEPVVTLCGHLYCWPCIYEWLRPGVESTASDNGSSARRQCPVCKATLSPDTLVPLYGRGGSSKKSLDGMAIPRRPMVHREAVEQQNARSHVNDQHYHQSTGDSPQHQPLMQAHHHPVPPGFDFIYPPAPVGRGLIHSTAGGVLGGMAEVVLPWVLRGQLPASLHYTSPYHVAAQNVNPRLRRQQMEIERSLHQIWFFLFVFVLLCLLLF

SEQ ID NO: 70767 - protein, 52 aa, Zea Mays
MHAGREVGGVRPRAGWPPTSAARSRDVIGSNTDGYHRNHICFHIFIRIRIRI

SEQ ID NO: 70768 - protein, 95 aa, Zea Mays
MKDYTIYVVSITIRIVLGFMLLALIWKFDFPPFMVQIIAILNDGSILSPKKLFYVQSLEKTVQDDFQKLSSLYLQVSTISQALNSMTRSRNLAGS

SEQ ID NO: 70769 - protein, 1618 aa, Zea Mays
MDPAAGGGRGRDRAGFERACRLPNTVHSEVLPSLPLPTLPRELGFDALRDDEPLAAPDRPDTIMQAANIARVLADTDVSHLGFTAADNVDVDPIRCSWLWREVLKHNPDAFKVKAPSPSSQGPFGGPGYQNQEHEKHFEHFTPNTSKARNESAFPQDEIDSHREHFYNELTSDSIASKKPKIRKRENNNSVSSSAPSIPNTQDVITTFCEVVEDFCGKTEIPDDGDGGDWLSIPLGDVKVLVNEITSVRSKRILHEVPMDTVTRLLDVIDRQIRYSQGLSIDVKENSDVVDAEPLVFSALEASHAALAIMTHHDMPKQLYREELIERIIDFSRHQITDCMAASNPTFRALYKPAENVANDGDDDEDDLENGQVSKRRRTATNLSMRKSSNNRTYHLADEDQKQIQMITALLVHLVQFSAIVPNSLKGTVDWTTIVDASGDADYYPIKCHEAATEACCRFWTDVLQRFTAAKSQDMSETKGIIDNLVQDFLMILNLPEYPAAASILEVLCVLLLQNAGLKSKDTNVRCFAIDLLGGIASRLKHDSVICSEEKLWILQDLTDAGSDGSKILKNKCCVCLGGRDCMGAASQDNLERDSVCPLCFCKQQLNVLQTYCQSQIKENGKKTAASTSKKSAKPAEVPAVDIIQQILLSYLQESGPQDDGNLFTRWFYLCIWNKENQHSQEEIIYYLARLKSKEILRDSGNGLAISRDSAKKICLALGQKNSFCRGFDKILALLLASLRENSPVIRAKALRAVSSIVEADPEVLGDKRVQSAVEGRFCDSAISVREAALELVGRHIASHPDVGLKYIEKVAERIKDTGVSVRKRAIKIIRDLCASNPNTDTTHAFVEIISRVNDEESSVQDLVCKTFYELWFEEPTGSHKHLVADGSSVPMEIAKKTEQIVDMLRKMTNHQPLITIIKRNLTLDFLPQSTKAAGINSYMVASIQKRCELICKRLLERILQVEEGAAKEMEIHMLPYIVALQAFCIVDPTLCIPVTDPSKFVVTLQPYLNIQVDSKSAAQLLESIIFVIDAVLPLIRKPTQNVVEELEKDLKHMIVRHSYLTVVHACIKCLCALSESAGRGPGLVENLVNIFYKHLSGANSDSQTLGYILIAKPEFMLQKDMLKLIETALSSEVDYRLKIQGLQNLYEYLRDAESQLTAESTVKPPVRCEINGRSKVPVAAGAGDTNICGGIIQLYWSSILERCLDTNDQVRQSALKIVEVVLRQGLVHPITCVPHLIALEMDPLEGNSKLAHHLLMNMNEKYPLFFESRLGDGLQMSFKFFESIVSNHKMAANIKSNPIAFVKPGISRIYRLIRSNRNSRNKFVHSIVRKFESDSRSRSTVSFLVYCAEVLASLPFTCSDEPLYLIYDINRIIHLKAGGVESNLKRWTSMSQSQNTVDMPTLPGERHVVMQEPGGYYDNVGYAHERVNANPCSTSDVDMAKVQVDVDMAKVQGDCLDAIALQLLLKLKRHLKVVYSLDDARCQSFSLKEPPKSGETFSRQNIPFNVSSTNISLPSCLQDVASVYQDFKTVLHEDSMDFAVFIPSVQIRKRPTPRNTTNPTPRSTTRVRRTAASSVTKARGGARGDDSDDSDDDDWTGGPRVLDFSGGGRVTRQRVQV

SEQ ID NO: 70770 - protein, 83 aa, Zea Mays
MAATASLTTTAPSPPALLKASAPLLISFRPVSRHCKNLCIKTKATENDQSAKKHQKVKSILCQDCEGNGAIVCTKCEGNGRQA

SEQ ID NO: 70771 - protein, 623 aa, Zea Mays
MASSSKASDSSQRSKRSDQGMGKDAAAASVVPIHANLTQLIRQVQSGRLAYIKEKLEVNRKTLQRHSCSLFDVAAAAEVASRGTDGGNALSQRAAERQCGSDLANGIGERDVVSVQEENLATGTLALSSSGATAQRTIVRFVKLPLVEKIPPYTTWIFLDKNQRMADDQSVVGRRRIYYDTVGNEALICSDSDEEIPEPEEEKHFFTKGEDHLIWRATQDHGLNQEVVNVLCQFIGATPSEIEERSEVLFEKNEKHSGSSDKIESRLSLDKTMDAVLDSFDNLFCRRCLVFDCRLHGCSQNLVFPCEKQPYSFDPDENKKPCGHLCYLREQDMAARTRIYRRRGRNRKLKYTWKSAGHPTVRKRTDDGKQCYTQYSPCACQQMCGKDCPCADKGTCCEKYCGCSKSCKNKFRGCHCAKSQCRSRQCPCFAASRECDPDVCRNCWVSCGDGSLGEPLARGDGYQCGNMKLLLKQQQRILLGRSDVAGWGAFIKNPVNKNDYLGEYTGELISHKEADKRGKIYDRANSSFLFDLNDQYVLDAYRKGDKLKFANHSSNPNCYAKVMLVAGDHRVGIYAKEHIEASEELFYDYRYGPDQAPAWARRPEGSKKDEASVSHRRAHKVAR

SEQ ID NO: 70772 - protein, 172 aa, Zea Mays
MGSEDMLVEIHPRELRFLVEVKKQSSCCIHLVNKSDQYIAFKVKTTSPKKYCVRPNIGVILPLASRDFTVTMQALKNVPPDLQTKDKFLVQTTVVPFGTADEDIVPAFFSKETDQYIEEKKLKVVTVRVSEPQVEKLINGVPHAKETAGVTVAEQTLDSVNEAPNVVNEKQV

SEQ ID NO: 70773 - protein, 65 aa, Zea Mays
MPIHSSSVGAGTGTMMAAQRPSPHDDVGVELLPLPLDDASLVRWARRRMGFIQGHTPNPNNPSGS

SEQ ID NO: 70774 - protein, 108 aa, Zea Mays
MALKLGWRRGGGGWLALPLGNRTTASSSACSSSNLFVGGLSYDTNETALKDVFSQCAKVICHPTSGKSKGFGFVKFSSQNQADAALQKMNGQVLDGRKIRVHYANGTG

SEQ ID NO: 70775 - protein, 694 aa, Zea Mays
MESRYGVVEHGMLHYLEEFFSLQIEHQVRKKCSPLLESALLPGGSDSTLHEWKAVPDIWRTAAEKYADLVAVVDPYHEPPTEWTYTQLEQEILDFSQGLRAIGVAPDEKLALFADNSCRWLVADQGIMATGAINVVRGTRSSDEELFQIYTHSESIALVVDSPQFFNRLAESFMSRINTRFIVLLWGDKSCIDSQAIKDIPLYGYKDIIELGRESRNALFLSDEQGQQDVFESISPEDVATLIYTSGTSGTPKGVMLTHRNLLHQINNLWEIVPAEPGDRFLSMLPTWHAYERACEYFIFSYGIQQVYTTVKYLKEDLQRYQPQYIISVPLVYETLYSSIHRQISSSSAARKIIALSLIKISFLYMEAKKIYEGTVLSNNLVKPSVIAYMMKWLWARLVAAFLWPLHNLAKILVYKKIHSAIGISKAGISGGGSLPMHVDKFFEAIGIKVQNGYGLTETSPVVAARRPFCNVLGTVGHPIKHTEIKIFDIETGEVLPDGSKGIVKIKGPQVMKGYYKNPSATNEAFDQEGWFSTGDVGWIVPHHAMGPSRQCGGMIVLEGRAKDTIVLSTGENVEPAEIEEAASRSTLINQIVVIGQDQRRLGAIIVPNNDEVLAEAKRKSILGEDGELAKDKVMNMLYDELRTWTAHCSFRVGPILVVDEPFTIDNGLMTPTMKIRRDKVTDKYRREIEALFK

SEQ ID NO: 70776 - protein, 361 aa, Zea Mays
MEQDHSEKRSGIEAVIVAPSRELGMQIVREVEKILGPNDKRLVQQLVGGANRSRQEEALKKNKPIIVVGTPGRISEISAADEVDQLLSFNYREDMHRILEHVGRRPGGTSRDILGPLARRSERQTILVSATIPFSVIRAARSWGHDPVLIRAKSVVPLDSITVPRPALSQSDANPSSSSQSVNQAAVGSLPPSLEHYYCTAKAQHKVDTLRRCIHALEAQTVIAFMNNTKPLKDVVFKLEARGIKATELHGDLGKLARSTVLKKFKDGEFRVLVTNELSARGLDVPECDLVVNLDLPTDSTHYAHRAGRTGRLGRKGIVVTICEESEGFVVRKMRKQLDVAIKPCEFTEGELVVHKEEDVE

SEQ ID NO: 70777 - protein, 615 aa, Zea Mays
MDTPDRAAAQSAATRTEDSPVFSFLNNLSPIEPLRSSAYSTNSLQGFQSINITSISSIFTSPHDNVSKEPRLPKSPLGEISDKEVRADAAGTNEPPEPSNAARLFACTSTVTRETRTGTCTGVAGPPPTTGGPCDLALPRQFDNNGSPDHNTTPCHGVRSDLKQDKARKLLQAAQNAKKNALEKRKCLFSTEVRLLDGGGGGGGEPGSDSDGVLGCEWSDLVSPTSAKLLAFDATMDEHHRGVHLAAQNAESCGYLLSKLAGDGGVSDGAYPTASAQVYYQELVMGEDQSENAAPQMDAQETISAEETQDNIYEADVCVPLEYKVVESQQQRGIRRRCLVFEAAGGFSNSAVKRGTIEDRSVSTCSKGKSPAESQPRGLRGIGLHLNALALTPKGKMACQDPPPTASALLPSSASEKDARGELLCAGENFAHSGGELLEFPLDGCSAGGGFPVNDHHVSGQSVSPQKKRRKTDNGDDGEACKRCSCKKSKCLKLYCECFAAGVYCSEPCSCQGCMNKPIHEETVLSTRKQIEFRNPLAFAPKVIRMSDAGLETGILTTLRLRLVTREDAIVRSQAVSRNTVNATREVLDARATADVRVAKMLLAEEMPRLNSLKK

SEQ ID NO: 70778 - protein, 140 aa, Zea Mays
MTMRRAVDRPRQPRPHDATARTGRLRSGRACAPPSLPVSLDSSDGTGWPWPDQGPAAAARARRRRRQRRRQINSIGQPERSPCLCAARPCGPSIVGLQCAAFGGPHSRFALLSSPHNPAELVPLRSASTGQLFWILVHQH

SEQ ID NO: 70779 - protein, 129 aa, Zea Mays
MARGARFLLVLALLVALLAVVFQLYRLRKPRLWTVEELSLYNGTDEGLPILLAILGSVFDVTKGRSHYGPGGGYHHFAGRDASRAFVSGNFTGDGLTDSLQGLSSSESRESYEISEGCRNEGKERCTAS

SEQ ID NO: 70780 - protein, 341 aa, Zea Mays
MDHAEVSGLLCIGTRETDGGEESYAAEYPKMDQDTNATTKFDVVMETSAMYTDQINTNACLDEYHMSGKQPMEEMGFGSAHPFELPSEGMVADSGEESMPSSPDTSTSNYDAPGYTEQNLQHIYNSYDALVDKDGVVLTPAFMICDKTLYLEPHLTFSLDGIKIEYLDLDSFEDEKLSALQWEISNIISISCKWTRSVGSALITLLVGSTAETGNAGPVRARFSLDDSQWPRRQQRIWELGPRYQEIWKDIPSDDFALENWSIEPCLFFPRQYFSSWSLHLFHHCMPFSSPIWGVKLWRLTCPSSLNQKFLAKTTYKKMVYGFRLLVTKGASIRMTESSFL

SEQ ID NO: 70781 - protein, 345 aa, Zea Mays
MALALLSPSTPSHRILLRPIPFPSLPVARATSAGSFGLAFFCPLSRGSSSLQRTGAAGGVIDSAGEGSSEEPVAGWLSADLLRRISGAADADRVLDIVAESVEGAGAALGAPECNAIVSAAFDRGNIALALSVFEAMRSGFAGVGGWRWARPDVRTYALLVQRLAAAPRVADAIMIIDYVSRAGASSMDEVPFGIIVRCPTCMIAVAVVQPQDGTQVVSCSKCRYQYELFSGDITSIESEEVSMDISALEKALRFINMRKDGIPAAVHSIVIRSPSGTARTYRFATQNVTLPAQEGERVTISLAAPVNVYRDMGPLKVAARSQGFKPGEPMCLTNHINGCCFRIH

SEQ ID NO: 70782 - protein, 184 aa, Zea Mays
MSPIWVFGYGSLIWNPGFAYDDRVVGFVRDYRRVFYQGSTDHRGTPQFPGRTVTLEHQPGATCWGVAYRIKEEDKEIALEYLEVREKQYDEKVYLDLYTDSSPKVPAVENVMVYFATSNKENNQNYLGPAPLEEMTRQIYLAQGPSGPNKEYVFKLEDALHKLDQHVQELANALREYSDTELSK

SEQ ID NO: 70783 - protein, 203 aa, Zea Mays
MACRALALRSLLLPDPLHRLPAAAPPVWRASRGGRRPHLRCCSGGGGGEPGQPPQEAVLEAISKIARSKGRVALTTNMVMGGTVTDDASDEWLVLDQKVNSYPTDRGFTAIGTGGDDFVQSMVVAVESVLQESIPKGRVSQKLSSRGKYVSVNIGPIRVVSSEQVHADDNCQIQENSSRKEKEMRMHASFANVLNMSKLCIVP

SEQ ID NO: 70784 - protein, 471 aa, Zea Mays
MPTKVTKPWVPVNWTGEASSSRGHSVGGGGLELEPAADRLSALPDVLLHHVMSFMKAWDAVRTCVLSRRWRDLWASAPCVDIRVGRYSEPPQDFSKFVYRLLLAREALAPINTLRLRSPTDYDEDFDNSDVKMWIRHAIRLNACAIQLTGHPNLSAELDSIDLVSHHLKILKLAYTLVLDSFTRQLSSRCPSLEELELKDCLVECREITSVSLKRLTMVKCTFAKNFFVNAPNLVFVQCIAPDTWVPVFKNFGVLVTGSVMLDDSLLSRDFKKYQYDDDEYPQTSDDDDDNNSTFAPAKYVPDSDDSDEILSDDSEFLDDFYDEHFDDIKDNYDYGSDINSDSETYEYSEIANDYGDNQFGTRDNELDHTRGSKDHGCSAKHIINDYKNFGGQNVLHCLSNARHLELLGHSGEVIMRRESLNCPTFSNLKTLALGEWCISTVADFDILLVLLQHSPSLEKLYLQLEMIFVS

SEQ ID NO: 70785 - protein, 809 aa, Zea Mays
MQQQQQGLDIGKLQEVVKTRWLKPQEVLKILQNHELFTISHKPPQKPQSGSWFLFNRRVLRYFRNDGFEWQKKRNGKTINEAHERLKVDNVDALNCYYARGDKNPTFQRRIYWMLDPAYEHIVLVHYRDVLEGSISVSARNDSSTLNQNGSASRAEVHSSPGWTSELIAHCTNSCSPGSAEEVSSQISASESDLIQHKAALRKLKMQLSLEDKEDCDVNAEDVPADNEPIILPVIQNEEPGTSRNHDDIFDVLDFSEDHINGTGTHPCHSAIDVLKNSDTWLEDDQLEAILHPACMTLTENQWFRIHEVSPESAFSYESTKVIIVGDFLCNPPHSSWQVLFGDVKVCVEIIQQGVIRCHTPCLDAGKVRMCLLDGNGKSCSEAREFEFLEKPTKCMIDGNTNPCNEAQDVKLHQIPTKSSEELSLLLHYVHTLFDGHASGLFSNFSLPLQNLGCGIQSNQMDVMKKAYKQLDPENVQYRNIIHTVAALGYDLALKPLLSSGVPINYRDANGWTALHWAARFGREDMVVALLTAGAAAGALSHPTSEDPAAKTPASIALAYGFKGLSAFLSEAQLTTHLDSIESKENGKLDSREEGICRAVDRISDKSSHVHGGTDDQLALKDSLGAVRNAVQAAGRIQAAFRIFSFKKKKEMALGNRNSCCLSISEAGAVSHDMLEKAVLSIQKNFRCWKKRKEFLKMRNNVVRIQARVRAHQERNKYKELISSVGILEKVMIRWYHKGVGLRGFNSGAMTIDEEVDEDVAKVFRKLRVETAIDEAVSRVSCIIGSPKAMHQYRRMLNRYQQTKDDQEK

SEQ ID NO: 70786 - protein, 149 aa, Zea Mays
MSLHVHCHISGGHFLLDLIAGLRYVIFRKELPVVLKAFVHGDGDLFSRHPELEEATVWVYFHSNLARFNRVECWGPLRDAAAPAEDDSAAPADSSNSKDGQMMAMCEWPHRCPQQCDCCFPPHSLIPWPNEHDMATAAAADASGSAQQQ

SEQ ID NO: 70787 - protein, 113 aa, Zea Mays
MLLLTLLHMSIIPTDPPPHEQVRATPEHTTPFRRSFARRVRATLAISPLLVRDCLFMYGIAGFKLTHDEVCGQIKGPRSAGQQSVRSLNDSDEDTTPRLLSRASHSPGLSFII

SEQ ID NO: 70788 - protein, 468 aa, Zea Mays
MSVNSRSANVGRATPIFRSQINPTVAKIHQQLVQTVRSLRVEIYCFHLKVLFLAGIGWTVWKKRWFILTRTSLVFFRSDPNVPPPRGSEPIVTLGGIDLNNTASMIVKEERKLITVVFPDGRDGRTFTLKAETTEDLNEWRSALENALAQAPSVVNTAGQLPVVSTDITEPVEAAVEQSENKSVIGRPAEFALVDADGTTAFLQKALKFIEDYGVKVEGILRQSADVEEVKRRVQDYEKGKNEFSPEEDAHVIGDCIKCILREMPSSPIPAPCCTALVRAYRTDKTKRLDAMNRVIYEVFPEPNRQLLQRILKMMQIVGSHKAVNRMSSSALAACMAPLLLRPLLLGECEIDSEFSMAGDGSFQLLQAAAAANHAQAIVIIMLEEYDQIFDDIEDGSYSSDAYTESDIDKEYSTDNDIPEDYDGSSGSGEDVEEDLNDDTEHSYGMKVECDSNIRIDNANDKGSYYEA

SEQ ID NO: 70789 - protein, 112 aa, Zea Mays
MCGFACRRRSTSTARRRPGTTRARRAARRESRRRGGRRRPRSSRRQLRHATETGGRRPGRGPAPFLPSIADEIAIFSSFLVSKGTGVCVLQASGSKLQSPAHGSDEPLHKMS

SEQ ID NO: 70790 - protein, 324 aa, Zea Mays
MTKSGALQLARSTGGSLSKDQVKSAVDQYVKYHDLHGGEQESRKSNYADLANKYYDLVTGFYEYGWGDSFHFAGGYPGETSREAIKRHQHFMALQLGLKKGMKVLDVGCGIGGPLIEIARFSSTSITGLTNNDYHVSRGKEHIFSAGLSEQCCSLKGDFMNMPIADNTFDAAYAIQATCYAPEAQGVYSEVYRVLKPGQYFALDEWCLTDRFDPNNAKHLTAKAEIELGDGLPDIRTTRQCVQAMKDAGFEVIFAKDLAQDFPCPWYQTMDPNYFSWANFQCTRPGRIITRAILILFLSGQYTRVPPYCPSRQRGSLQRPNECL

SEQ ID NO: 70791 - protein, 295 aa, Zea Mays
MDGFTLPPFESTCIFRDNDIIRVKQKSCTKHIEHNDVHCIQDHEIIEKRSLPVDGKILAIQDKEDVCKHQEEEAHDDHQLEENATASHSTENNGTSLKRKRNDGVADIPESSKGQRLKVTNSGKHIDYSKKEQNGSKKLKLSVIDIEAKKATPQHETTTTLVEQQKSEGNYQTELKCEAKVTNYDAQSDTKKLESRSARRKKIKRLMKQRGKLQIEKNVHGDSPIAADCPSSSNQDGLPVPSSNQNGSHVHFSSLKADEDESETSDEIVPVVVRPGHIRFEPADVETGPKLRGRY

SEQ ID NO: 70792 - protein, 286 aa, Zea Mays
MEEVGGDMPLPKQKLSAAPYRDGGGVVLVATGSFNPPTYMHLRMFELAKDELELRGYSVLGGYMSPVNDAYKKKDLLPAAHRIRFCELASKSSSFVMVDPWEAMQNGYQRTLTVLSRIRNSLCKDGVADQGSLKVMLLCGSDLLESFTTPGVWILDQVRTICQDFGVVCIRREGKDVGKLIDNSDILQECRDNIISVDEIVPNQISSSRRTQAVYGRQWRRHSIAVIEVFGGKLCNRQGSAVDVYLRSQDTIWTVHSGQLLRTNTEINGTGHLNYYYIFVKFDSGG

SEQ ID NO: 70793 - protein, 500 aa, Zea Mays
MLVSDPIATTLSPRHKGRGPLGLAHRNQSCFSPPRRDQSSHRQLFASPLRFEGTMECVTDMPLATLDSRPRKRQRLGWDVVPAEMYQVTRPRLGWDVGPAEMNQFALCGQEVVNAFSAAVLGLSSGCVSSQVNQEQPHDGSPPLREDDKNGHYVFAVGDNLTSRYKINAKMGEGTFGQVLECWDKETKEMVAIKIIRGIKKYRDAAMIEIGMLEKLGKYGESRSSCVQIRNWFDYRNHICIVFERLGPSLYDFLRKNNYRSFPIALVREFAKQLLECIAFMHELRLIHTDLKPENILLVSPEYIKVPDYKVSSQSPKEGSYYKQLPKSSAIKVIDFGSTTYDQHDQSYVVSTRHYRAPEVILGHGWSYPCDIWSVGCILVELCTGEALFQTHENLEHLAMMERVLGPLPYHMLKRADRHSDKYIRKGRLNWPEGCTSRESMKAVMKLSRLQNLVMQNVDQAAGDFIGLLQGLLKYDPASRLTAREALRHPFFTEGFGRRR

SEQ ID NO: 70794 - protein, 1259 aa, Zea Mays
MLHCPPSTPAVLPGFISTTASRMAQVTHGVPPAARGPTFVLAAGATSFLASPSFAVTAEVDFDDKSSWWYLFKDYWLNLKTNLSLTVEEISAAKSQKSGELPDTNDEINSESSSGRHLENNTSKKRGRNRSKQAAIEQGSEGKETTGKSAKLGLSGIRDAQTSSGKKVRKLSRRSLSSQHSPKDSESVGTSTSSADEVSWASKELINFVAHARNGDKSVINQYDVQPLLLDYIKRNNLRDPRRKSQIICDSLLQSLFGKDRVGHFEMLKLLESHFPTSEVSPIDADENHGGVVDPDPSQDADGNSEASVVMSSEKRRKSRKYDLKHQPNIDDYAAIDNHNIGLMYLRRNLMEELIDDVDTFDEKVVGSFVRIRIPGTGQRQDIYRLVQIVGTGRSAEKYKSGKRTTDITLVILNLDKREAVTIDIISNQEFTEEECKRLRQSIKYGFIPRLTVGEVQEKAKVLQTLKVNDWIESEKMRLGHLRDRASDMGRRKELRECVEKLKLLSTPEERARRLNEEPEIHADPAMDPYYESPEEQEQEIERSSFNKSRSSFLRKDGSLVSPGKGDGRNAAQRDPKTNWESNRNTRAESSSHMESPLSRRSTYSSQGESVGYTNKPEGLNIDAQTVRLEGTTRSAPQGSPGASSGSLATNIGSGAKTASQSAINESEKIWLYMDPSNKIQGPFSIIQLRKWNSNGYFPPSLKIWKASEKQDDSILLTDALAGKFEKDLPPWEPPHVSLSQINKTPLEQSTIADEQTPKSVIAKSFSSSDQRHDYSSTNLGTTMIHSGSQGYYGMQNSHAAYTSQQSLTGSWNATSSQFGVAISPLTPTQPAMQSLSGQNIVAAENMGHLTTGMAPATANAEMVNSDLTSQNQMLSSLPQTDDRLADGIESKSGEDVSHGRVRSSAEAIGPQDAQLGPVQLNAQQLENTRNHMSSIDLSKSMMPSQMMSAPSAASVQPSLTTTARSDNQSSGWAVPAQMANTPGQSQITGNLTWGNTPQGDASLGWGMVGQSNMNMPWVASAQGASGYNMGVAMPTQPNAVPNMGWLPNPGNTSMNMIWAATQGQGTPNAAPMMGGQMQGVPMAPWGGVAAGSANSYPAWGNQQAGNMNQNVGWSAPVQGNPGQANNNMNWNAPNGNPNWNNQQRENGGRHSGHRGAFSGGDSGGRSWKSRSGGDGGSRGHSRFSHSTNTEGYPSRTDRHYDRQNSGNERRYENHNERNGRQFDRQPSDNERNHDRPDGRHGGRDDDRQADRSESRELR

SEQ ID NO: 70795 - protein, 161 aa, Zea Mays
MEMVAVYCGGLYTAKPELAARRIEAIGFQVGHQLSERYTMERPRFSDHLEAIKFICKDFWSELFKKQIDNLKTNHRGTFVLQDNRFRWLTRVSLDPRTENTDSTENDSAALGDTAAQTTTMLLYFPCGLIRGALTNLGISCSVSADMSNLPACSFVVRIKT

SEQ ID NO: 70796 - protein, 537 aa, Zea Mays
MYRLKIFNAANLGGQLGSLGNFTSITEINLSNNNIGGSIPEDLPVTLQNIFLSDNQLTGSIPVSLSKLHSLTAMSLNDNHLDGKLPDTFDSLTELVNLDISSNNFSGPLPPSLGSLTSLTTLHMQDNQLSGTLDVLQDLSLKDLNVENNMFSGPVPPKLLNIPNFKNDGNPFNTSIAPSTSPSSPTGSPTQTPSSSSSPSGSPSPSNAASNSSSGSTARNSNSTSSKKKKPSTLRTVGYVLLAIVLFIVLALLVVFCLSKYQERQTRRDYSMAQLGRHQRAEEPKSKQASVQSRHDAKKGLSEVPERKKPREINLAVPVAIEKPPEKRKEHVINLERTESEIFAAAPPPPPPPPPPPPPPPPPPSTPPPPSPPPRLPSPPPAEKVTVNPIVRPVKRVNTPPRTGPSTSATSFSVASLQQYTNSFQEQNLIRESRLGKVYLAELPEGKLLEVMKIDNANGRIPVDDFLELVACISDIRHPNILELVGYCAEYEQRLLVYNHFSRKTLLDVLHEGEDIDNPLSWNARLQIALHAAKALE

SEQ ID NO: 70797 - protein, 423 aa, Zea Mays
MAAPRKGTATPLGAVFSPEETKRAVARVAESIAGRRAELGHLLGFVADNAALVSLVNRLPVELSHEIMVPFGGAAFFPGRLIHTNELLVLLGEGYYAERSAKQTTDILHRRGQELEAQVEAMKATITDLEAEANFFESTATEASEGLVEIREEYDEDTETKTTRSEASIATGVMFDNDREHAQIMARLVELEREEKEAGNTCEDDDDDGDDDGDAGTSEDGEENKEPGNALSDGNEDHSSGSGALFFGNGGNDRSNGNIKLKSALKKPGGDEMLKDISHTPSADTSHPVFGGQTSITNPDVRVHTKAVSFEDDKFVVSSSKSPTLLVGSIQSDPGLKSSSDPTPSCDRKIISSGRKAFTGSIVEHDDDDLSTIQPSAGNSLAKPGTSASSRPMSKFKMQKGGRAPSPVRLFGGDTWDVQLDSV

SEQ ID NO: 70798 - protein, 785 aa, Zea Mays
MAAPAARRIVGAEVPIPGSDKLRWIDLTIPSSSAAAPASPSDPFVCVPPRAASGCHIIPSGDSQYYLSWRIHEEHPNVLEVIELSPSKEFPSFGLRLAFQEALSPFAFLCEREGRRQGELVYMLYVLTVSGVALLCHLRSPFSYVSGSVLHQDDIAEFNLQTQAQSAKVTAVTAKPGCIVIGRQDGSICSYSLGKLAPNSPGFSNELRDDAGIGRLWTLMSRTKTVGPVQDIVATVVNERDLLFVLHLDGHLRIWDNHMKLLNYNVHSNDIEGHPSRLWVGKADDDQELISLAILHQNTVVQGCDYVAVYGFGFSAAERFMFSSEPSISTIPLLEGKLADLKIATYKLWILKEFGSMLYEILQYDIDTETAKCCSEKVCCYVLQEDAISEQLFQSSDNALDDLVWTADSMFSSLKEQAFTLISSMFLRRLLQPGVNHCSALRETLLEHKRFLSDSEFQSLTANGLRKEILSIIEQEGSSQTASATAYHWKQFSARYLHNWCWHNKPYGLFLDTTNEVFGLVRKGSFSLFRCLEGLEMLIYGYDHGVNLLDDVSDFELLNEVLRCMGNIHHLLGRSSTAAYYESLISSIISSDEIVSHIVKILETGFSHQSSSSLSTLLGMDTYVERRQAAHKSQRKFSVEMLRSFHTLQSRSASWSAVFDVIEKFMKCLNTNMNVQSYGSKRVCNVNSVLLVQATSQVARTMFECAFDLFLFLSYLVGVGGQVSLLQNDVARIKLKLFPMIQDILGQWIVLHFVGTSPTSPPTIDDFSYQLSSLQLDLAQLCEAF

SEQ ID NO: 70799 - protein, 492 aa, Zea Mays
MGLPQIPVVKEEEPTEVSTPAGSSFSVDGPCDSGKLLEGSSSGSWFQNPSISDFKRKFAPGAASNGLNSQFRTRHAVDDPAGYQSLNPKPRDPNYRSCTKIKSTLHIPAMRVVGFDSGTDGSTGGPDIMVSHKMHSSLVIGNCDSSVVHHEVQARKRVLSPLTNALPAGQFYGNALNIGSGDEKVQNPRCVRQLSYSGFHDSKKANTGALDSFQPSTRSELRYSDWSTGQGFCKFSSNTFTDGPLLEGRELFSCSDQPGVEGIMNLAKVPARLSHSPPPTLSPLRPKWMHRMKAARAQRDLTGRIENDIIDLKEMGRSNFDDYSEYVGTIRMGDILEETSILHDGFDTMIPKRNFHRRYRCLGPESAPVSTHIECINSSNLLPVRRSLVGSFEESLLSGRYSCGKDNQSIDGFLAILNVTGGSFSPPTQKFPFTVSSIDEDSSLLYYSSIDLAGRLPTNNTKGPKLKRSLSSSDSRSTNSRLRIPVKGRIQL

SEQ ID NO: 70800 - protein, 57 aa, Zea Mays
MNLCTCEMINWANWLVHKVYDGRQTPKLIIGNIETISLSISPFLVIDANTNQSKYKV

SEQ ID NO: 70801 - protein, 220 aa, Zea Mays
MGAAAAAKHALQVVAAGGDAGQSSFSANSPPTTGAGFVALDVGELSSLAGDAGPPGTPIAPPRTPRVVRSLSRKGDRKPADADANATAGGGRERPQLFVHVAAGDLGDAPGSARLVVHTPLAGTPGSKSRRFGRRAAPWLDPRRVVFLFATLPKDTFVSLRQNDGDGDGHARSGRVAERRTDCPRRRFCRPQPPSGCRCRASSGALASRPSSSPSQQRQQ

SEQ ID NO: 70802 - protein, 580 aa, Zea Mays
MDYLRTVVPSQLLAERGSNLVVINPGSGNVRMGFASQDVPFNIPHCIARHINPQEGEEPRFSVRDQNAERESAYDIIAALMKIPFLDDEEMPSPNQPLPPKMGRVDGFSSQQNRDDNKFTWTDVSERIIKPSTPFDRSVYKDAEEDTLPSTSDDDNGQDFKENKYKEMIFGEDALKIPPSESYCLSRPIRRGHFNVSHNYSVHQVLEDLRTIWNWILTEKLHINPRDRGLYSAILVLGETFDNREIKEMLSIVLHDLGFSTAVVHQEALSAAFGNGLSTTCVVNIGAQVTQVVCVEDGVALPHTALALPYGGDDISRCLLWVQRRHGTWPNFQTDPMSNPIDMLMLNKIKESYSQIKTGSIDAAVLVHSYDNERSGGHQKTRLSAINVPPMGLLYPRVLVPEEYPPPPRSWFQDYDDMLEDTWQTSDGLYPSGNGGFGMWDSYPMFPTRLKKFDNIGLVEAIISSVLSTGRVDLQKKLFGSIQLVGGAASTAGLAQVLEQRVRTKISANQSIEKVEVLQSRTYPLFVPWKGGVILGVLDIGKDAWIHREDWIKNGVHIGSGRKYKDSYFLQAQVMCYYNV

SEQ ID NO: 70803 - protein, 465 aa, Zea Mays
MPARALASAALATLRPPPRCPRPPSAARSPPFPQTLSCTSCLRLHSRCSCPPHRRDNRLRIRRQIPALPPNPAPIVSADPAFARVSLPRRGPTAMVEEHGGRGEAGTSGGGGEARHPQHAHGARIPQGGVPQEEEGRCRAAARATTEGDVEYDDDDSMRPTAEPAKEEDIEGAVCSAPCRRAVRNTTPSPSRDMVDARASTGGEDPTAVDVVVTQLALHRLRPPLDFLASPIALLEDCKYSEHHRCQNQRSDVKGNCCRGLGSRTGGRARGCGPPSTCPSRRRSCRSKQSRGEQSRAAQIETSSRPSRAPHLHLGHPLARVEDELLLCLRQLCAPCSAACLPRPQGGCVGVASDNAKAPSRPSRALCLHQVAHPSKWRTSSSSTASRPSSSPRTHPQPRSIARSEPARHELHRGTDPISAPGRGLNLKHGKATSPLGPIRNWQGIPTQICKYSNRFARSFSSLPA

SEQ ID NO: 70804 - protein, 446 aa, Zea Mays
MNSVLGRITATTQELAHYHSGDEESIYLAYSDFHSYVVGDLACTKELNRWFSKQFEKGPFRLVAEEGKSKCSWVSLDDITNCLIRGDSEKSHHHQRVAELQRLRSIFATSERQWIEAQVENAKQQAILSILKAQVSSDEAHIHRDIHSLRRKGSELAGELSTLSQKVQALVSETIPCLCSELAQLQGTYILQGDYDLKVMRQEYYINRQKTFINHLVNQLARHQFLKIACQLERKNIASAYSLLRVIESELQSYLSAVNTRLGHYNSLIQAASEVREQGAIDDRDTFLHAVRDLLCIHSNVQATVPTYMSAHALVQQISALQSDLLSLQSELENTLPADRKRCINELCTLIQTVEQLLFASSTTAEPILTPWPLMRALDDMENANAQVEVSVEEVTKARTQKIKIFENRAHEVGRERQIFVDFFCNPERLKNQVRELTSRVKALQD

SEQ ID NO: 70805 - protein, 1247 aa, Zea Mays
MLHQNNTIKAVVFSECRIGSTGATLLASALANNRSVEDFQIWEDSIGSKGAEELSKMIEVNFMLKKLIILDNSSITVAPLISAVLARNRRVEVHIWGHGCGTKGGTNSCKIVEFLPETGSMKIYSSISSTGLQRVACALPWNTTVTTLDMSSVPLKSKWTKELRGVLERNRSLKTVKLSKCSLGDKAVVYIAAGLFKNSYLENLTLDGNRFGGVGVEHLLCPLSTFSPLQRQANTTLKVLSFGGERANISKFGVPAILQMLETNQSLIQLAICNDASLKPNDVVKIFTSLERNATLRSLSLRGCKGVEGEAILQTIMSTLEVNPWIEEIDLHGTPLHVAGKTDQIYEKLCQNESLVLPNDFLDLPLSAPTCCRVFLCGQESAGKSTLHNSINQSMNPLKSPHINITSTLMNPVLQMEYTNENKSSVFFDGNTKMTMYNLDGQEEGFPSHDFMFLVHGGPCFFMIVSSLVLKPANRYPKSIEQIELELIYWLKFLVSNSKRVSQLFLPSVTIVLTHYDKVAHLPEGLQPIATLVQRLREEFHSYAEIYPTVFAVDARSLVSVSRLTHHLRMTIKTILQQVPQVYEVCNDLVRVLHDWRLKNNKAVIKWSEFREICQLNIPELRLRSRRDNVEKVDTRRRTVAKSLHNLGEIIFFEDLGVLILDCDWFCRYVLNQLATLKSIKTERSGFIRKQELEKILQEKLCNQIQGSNWRAGASFQGNDVINLLLKLELCYEQEPGNPDTLLLVPSILEESKEGAQQWHLAMPECRYVGRCLKCTDIHMFLTGDFFPRLQVRLQNKIMCMGQQQGALYILEKNLIYTVVNSIHVRVVLGSTLESSVDVLACSSKSVTDMVRIFHKLIIPTILNLSSSLMFEESIIRPDCVKYLIPHRFLQTQQLPLKRMKQILLSLPAESMYDYEHTWSAIESNKRIILQSGSDHARELLSDDDFHEVLHRRYYDLQHLATELAVNPDNQQQHEIIPETDVVDPSILGIAKGVEMVLQRLKRVEQGIRDLKEEIASLRYYEYHLLTELHRKMDYMMNYNTQLEERKVPQMFYLVSLDNRSKQLVTRILPGMRSLRVHMLCEFRREMHVVEDQLGCDLIQVDNQTVKSLLPYMSKFMKLLTFALKIGAHFIVGMGEMIPDLSREVVRLLDSSALYGTTASAMSVGALGAAALYGKSRNGSTSDMGEDMTAARQWLVDFLKGQGVLTGMDIAQRFGLWRVRYRDDGHIAWICRKHIAAREEEIFELPL

SEQ ID NO: 70806 - protein, 864 aa, Zea Mays
MLLSPHGRLGSHRDASVAVPAPKPVRKEIKWKTSSSPSPVVSPPIHFSSRFSPLALPMAIPEDLEGTSGDGGVTNRGSRGRRKGAAKGRGRGRPRSADRSFPPPAMAGVAVGDRVLRERRHTTNVFCERDTDVDDEDDVETVRSKDSRSGDVLQTAKKRKKGGAGKVSVTKRSKREGEEQKKASPSKDKDCAETNGKRKMLTGDNALMCHQCQRNDKGRVVWCNSCRNKRFCVPCIERWYPNLSEDEFAAKCPYCRKNCNCKGCLRMRGVEEPPKKEISEENQISYACNVVRLLLPWLRKLRQEQMEEKKLEAKIKGVLVNEMKLEQAEYNLDERVYCNNCKTSIVDFHRSCKYCFYDLCLDCCVEIRRGEIPGGEEIMRVKPEDRGRAYLFGTTNSKDGSKRFSMRRHSSSLENEPSNVVGSSEGANNSLELWKAESDGSIPCPPKELGGCGGSILDLKCFFPEKMLSNLEERADRIMRSEVFAKAVAKRSDQCPCYDHSGNIRTQDVRETANTKGSSDNHLYCPVATAIKEDDLAHFQMHWTKGEPVIVSDVLHLTSGLSWEPLVMWRALREKKTNGDVEDEHFAVRALDCLDWCEVEINIHMFFVGYMKGRTHHMTHWPEMLKLKDWPPSSSFDQRLPRHGAEFISALPFPEYTDPRYGPLNLTVKLPDGALKPDLGPKTYIAYGFYQELGRGDSVTKLHCDMSDAVNILTHTAQVPYARYQLEKIEETRKKMKEQDLQELYGVSELNLSSPFTDSRNISADEMSKTSCLDVNDVPPVNNESEVQSGAGQCSDYIDKDRSYAGMHNGERTGGALWDIFRREDSDKIQDYLRKHATEFRHIFCNPVKQVLFSLHLFALFFLC

SEQ ID NO: 70807 - protein, 349 aa, Zea Mays
MACAGAAQKVSAVLYHYPCPDGAFAALAAHLYFSGAAHPVRFFPNTVYDPIRSDSLPLEEIKDVYLLDFVGPPGFVEDIAPKVERITILDHHKTAFESLCVNATLGQNVTKVIDMQRSGATIAFDFFRNKLLTEVSTSRGNESGKDVAKVKYVPDNKAETVHKLFKFIEDGDLWRWKIPNSKAFSSGLKDLDIEFNVNANNKLFDQLLELDPEHVISHGQATLLEKQRLIDDCLEKSYEISLGCGQFGSCLAVDADAISNLRSELGNQLASKSRDFNLRGIGAVVYKVPELNNDQILKVSLRSLEQEDTTCISQEYGGGGHRNASSFILSVTEFDRWKVGSSRPKVLKT

SEQ ID NO: 70808 - protein, 179 aa, Zea Mays
MAAVVALAPASPALLPVPFRGRRDGRVALSPRRTRCSAGRCRATAQTFQGGAAASYAREMERLSAKESLLLAFKDAGGFEALVSGKTTEMQRIDVNERIVGLERLNPTPRPTTSPFLEGRWNFEWFGDSSPGAFAARLLFERSPTAVAHFMGLDVLIKDGYSKLSSNLKFVNTDERGIC

SEQ ID NO: 70809 - protein, 70 aa, Zea Mays
MADNPVEHSRTKHIAIRYHFLRDHQQKGDIEIAYINTKEQLADIFTKPLDEQTFIKLRHELNILDCRNFF

SEQ ID NO: 70810 - protein, 414 aa, Zea Mays
MGGAGGLMLLRARCRLQLCLGLSRGGGGGGGADEIDRPTPVTSGVAFSFRPGEKRRKPNLGSGVPAGMSATVAGHRSRFRNRTTVPREPRNSEDTWARASEAKPIRNIALRPAQSRPDLGRGHASDDKLPRGGEGRLGVGAELDELHLHLARDSHALACSCRAGAETMGSPHHGHGVDGGGRSDDEEGDAGSWRLRMDSGFSVPDRFHRQPPFYARIFGGSHVQFTVPGKQRKIAKYYKKQENLLKDFSEMETMNEMGGLDQNAPTEEEQKQLAKSERFAINLSNAVNLVLFVTKVVASVESASMAVIASTLDSLLDLLSGFILWFTAYKMKKPNKYNYPIGKRRMQPVGIIVFASVMGTLGFQVLIESGRQLITQEHADFKFKQELWMVISMSSVAVVSSSSCSTAERSRMRS

SEQ ID NO: 70811 - protein, 61 aa, Zea Mays
MDTDLAGDVDTRKSTSGIIVFFLGNNLISWLSQKQKVVALSTCEVAYIEAASDACHGIWLA

SEQ ID NO: 70812 - protein, 131 aa, Zea Mays
MIAEVHMPCKDSFSKHCAKSKKVQIVQQINHDGEVNRARYMPQNSFIIATKTVSAEVYVFDYSKHPSKPPLDGACNPDLRLKGHNSEGYGLSWSIFNEGHLLSGSEDAQICLWDIKANSRNKSLDALQIFK

SEQ ID NO: 70813 - protein, 101 aa, Zea Mays
MPFCLPRSLNGINVLHRSPLFTNLSNKEAPEVNYNINVHDYTMGYYLADGIYPSWAALVKTISAPCENKRIYFAKAREAIMERAFGVLQSHFAIIHGLARL

SEQ ID NO: 70814 - protein, 377 aa, Zea Mays
MRRPIARGEPKVQTLALAPPSAAAPTKMGAHRRQPSSHRRVAGALTLLAASALALLLLASRRVPPTYGVIIDAGSTGSRVHVLAYRSTAGLPQLDWARMASMKATPGLSSFAADPRGAGLSLAPLLEFARRRVPRESWGETEVRLMATAGLRLLDSAVAESILQSCREVLRGSGFQFQDEWATVISGAEEGIYAWVAANYALGTLGGDPNDTTGIIELGGASIQVTLVTGEPVPPKFSHMLKFGDVSYNLYSHSFLHLGLNVAYESLHDLLSSPGLRSMATHLISQAKYKDPCTPRGFTRIAGSAKLPVGVLEPKVEYRPFAHSAGNFSECRSAALTLLQKGNEGCTYHECRLGAAFVPELEGKFLATENFYHTSKD

SEQ ID NO: 70815 - protein, 552 aa, Zea Mays
MSYAAYKMMHLPTGIDHCAAGFITHSPADAAAFSTPAPAPTAAAGPDGDIDSTAARAPRRVGPTPNLVVSAANVLEVYAVRAEVATGAEDAGNSSSTGTILDGISGARLELVCHYRLHGNIESMAVLSDGTENRRDSIAVTFNDAKITCLEFDDSINGLRTSSMHCFEGPEWFHLKRGRESFAWGPIIKGDPQGRCGAVLVYGLQIIILKAAQSLVGEDEPTRVLSSTAVRIESSYVIDLRDLEMNHIKDFTFVHGYIEPVLVILHEREPTWAGRISSKSQTCMLSAFSISMGLKQHPMIWSAAKLPHDAYQLLAVPPPISGILVICANSIHYHSQSTSCSLALNSFSSQPDGSPEILKTSFHVELDVAKATWLSHDIVMFSSKNGEILLLTVVYDGRAVQRLDLMKSKASVLSSGATTLGSSFIFLGSRLADSLLVQFSCGMPTSVLPDLTDEPADIESDLPFSKRLKRIPSDVLQDVTSVEELSFHNKAVPNIVDSAEKISFVVRDALINVGPLKDFAYGLRTNSDPNAAGIAKQSNYELFLKSREAIEK

SEQ ID NO: 70816 - protein, 282 aa, Zea Mays
MNMENDQPLLPAPPVNLESAILEQNANMVALKEGCSVGSELPPGLQGNFGGNKANTCTSALHSIDEDTEFHGPVATISTTGQSEGSDTEINVPNYSDLEALILDLDLIPWDQESDFIQPEVSRFQYPESRKDLIRLEKGVCSYMNRSIMSKGAFAILYGQRTKYYIREPEVSLGRETEEVHVDIDLSKEGKANKISRRQAVIKMDDGGSFYINNTGKFSIFVNSKEVPCSKRINLMSDSLIEIRNLKFIFHVNHEAARQYIVRKRRGSSQGGITAFDWSQNP

SEQ ID NO: 70817 - protein, 360 aa, Zea Mays
MRPHAVGMGGGGVGRRKAGAAAAAASREWLVVPASGPARVEEAGKHAVMARTGLPARDLRVLDPLLSYPSTILGRERAIVVNLERVKALITAAEVLLPNTKDPAFARFVRDLQTRVLASSSDQTSTLELEAYPALDELTSKISTLNLERVRQIKSRLVAISGRVQKVRDELEHLLDDEMDMAEMYLTEKLTQQEISEASSRAEVDDASLTEDDRDEDYRSEPDGSNGSVIGYKPNIEELEMLLEAYFVQIDGTLNKLSHLREYVDDTEDYINIMLDDKQNQLLQMGVMLSTATVVITAGVAVVGLFGMNIGISLYADPTTEEETRAANRKFWETTFGTVAGCVILYIIAMGWGKRSGLLQ

SEQ ID NO: 70818 - protein, 233 aa, Zea Mays
MASWPAASRRRSSGGMKSAELSGSGASYGYGRTSSSPDACGYGRQFSAYSARSSQVSRSGSFSAAAQRVAGAFTGCFVPRRQVKAGEEEEEEEKKSKRSMDSGSYHGWNEANLSAAAGSWQEGRALTIADVSKATSNFSEKNVIRQGRSSTMYRGKLRDGSQIAVKCVTKLNDQSPTAELWRELEKIQHRNLARLFGFFERAADSLVVVEYVGNGSLREHLDGMRCCYGISSC

SEQ ID NO: 70819 - protein, 488 aa, Zea Mays
MSIEDPHAVTLYKMEVLRNSDTKARPLFRVISEDGVQIDGSTPNACWKEIYRRIKEKQCTELERNVCQSSGSYMFGFSNPQIRQLIQELPNARSCLKYFENGGDTILGYRAVQVNWKDLDYCNVCDMDEEYEDNLFLQCDKCRMMVHARCYGELKQLDGGLWLCNLCRPGAPRVSPKCCLCPVTGGAMKPTTDGRWAHLACAIWIPETCLKDVKRMEPIDGLSRINKDRWKLVCSICGVSYGVCIQCSHPTCRVAYHPLCARAADLCIEVVQTDMASSSGCARTEPYNLHRRRGQKQPQVVATASLKRLYVENRPHIVSGYCQNRVGNTCGESIQPFGLSDAVQQEAIGNVSSMVEKYTIVKATFRKRLTFGKSKIHGYGVFAKVAHKAGDMMVEYIGEIVRPPISDTRERRIYNSLVGAGTYMFRIDDERVIDATRVGSIARLINHSCEPNCYSRAITILGDEHIIIFAKRDIDPWEELTYDYRSEG

SEQ ID NO: 70820 - protein, 1446 aa, Zea Mays
MPKVFGTGVFEFRHPRAAEYPLPADAAPATAAAPDKVPASTGGGSITLLDIQRDRLTRVATEHWGTAAAAAAFDADLVRKIYGTELRVEGRGRKTVPLQRVMILEVSQYLENYLWPHFDPVDASFEHVMSIILMVNEKFRENVAAWTCFHDRKDAFKGFLWRVLKLKEEERALNMAEKTNYLLFMINSFQSLEDELVRETILQLVSLKLWNTLSFGRLQMELCLNPELIKKWTKIRRREAKEAKKADQPINPSEMLENKFLRNLIEEFVEILNSKVILSNQDGAEESVLNESFSGQIDDSCVLYCERFMEFLIDIFLRPLVADVAVVAKCHLSALYTHEKGRLFAQLVDLLQFYEGFEINDHSGTQLGDDDVLQAHYSRFQAFQLLAFKQVPKLRDFALSSIGSLHKRADLTKKLLVLSDVELQDLVCNKLKLISEKDPCSERRDFLIEVLVAFFEKRQSQKDAVNALPLYPNEQIMWDESLVPSINYSGEGCLALPKLNLQFLTLHDYLLRNFNLFRLESTYEIREDIQEAVPHLHAYINNEGETAFRGWSRMAVPIKGFKITEVKQPNIGEVKPSAVTADVTFSISSYRYQIKSEWDALKEHDVLFLLSIRPSFEPLSPEEAEKSTVPERLGLQYVRGCEVIEIRDEEGALMNDFTGRIKREEWKPPKGEIRTVRVALDTAQYHIDVTETAEKGTENVYGTFNILMRRKPKENNFKAILESIRDLMNETCVVPEWLHNIFLGYGNPSAAQWMNMPDLLEVIDFKDTFLDANHVQQSFPDYQVTFINSDGTKNLHPSPPFKIRLSKKMRESSHALPGNMNSNLTVKSRNNMADGEPQKEKLIVETYIPADPGPYPQDKPKQNSVRFTPTQIGAIISGIQPGLTMVVGPPGTGKTDTAVQILNVLYHNCPSQRTLIITHSNQALNDLFEKIMQRDVPARYLLRLGQGEQELATDLDFSRQGRVNAMLVRRLELLGEVSKLARSLRLPEDVGYTCETAAYFWLLHVYARWEQFLAACAQNQDKPSFVKDRFPFSEFFSDTPQPIFTGESFEMDMHAAKGCFKHLSTIFQELEECRAFELLKSTVERANYLMTKQAKIVAMTCTHAALKRRDFLQLGFKFDNLLMEESAQILEIETFIPMLLQRQEDGHARLKRCILIGDHHQLPPVVKNMAFQKYSHMDQSLFTRFVRLGVPYIELNAQGRARPSIAELYNWRYRELGDLPYVREQAIFHKANAGFSFEYQLVDVPDYKGKGESAPSPWFYQNEGEAEYIVSVYIYMRLIGYPANKISILTTYNGQKLLIRDVINKRCKPWNIEPPNKVTTVDKFQGQQNDFILLSLVRTRFVGHLRDVRRLIVAMSRARLGLYVFCRRSLFEQCYKLQPTFQLLLQRSDKLALNLEECTPFTERPLEETGNIHYITGIEDINSSSKVQAGTSSSSAIHAVLCSSGK

SEQ ID NO: 70821 - protein, 448 aa, Zea Mays
MAREATNAWPRPSPSARKRSKGKRAVLSPAPPTQAAATEMEAEASVPATDYVYDALPGLHLAFSPEETLDDAAAGQDEDDATATYAVFRNEITEAGDVLADIPAADFFSLDVSTSASVEPEPEPEPPSPAPTAAAATPSISRALEDQPPQGSERAWFRGGRRFRSPMLQLHKEILDFCDFISPSTEEQSSRAAAVQDVSDVVKHIWPQCKVEVFGSFRTGLYLPTSDIDVVIFESRVKTPQVGLYALAKALSQKGVAKKIQVIAKARVPIVKFVERKSGIAFDISFDIDGGPQAADFIKDAVKKLPALRPLCMILKVFLHQRELNEVYTGGIGSYALLTMLITHLQLVWGGKDILGYHRSKEHNLGILLVRFFDFYGRKLNNWDVGVSCNSSRTFFLKSDKDFMNHDRPHLLAIQDPMAPDNDIGKNSFNYFKIQFSLTGKAGTMKIC

SEQ ID NO: 70822 - protein, 62 aa, Zea Mays
MLWPKKPYRHPRGVTTNIGRSCHSDFCRGQWIVVWRLTAPPRFLLTIDPYLGDIWNWFGLEG

SEQ ID NO: 70823 - protein, 154 aa, Zea Mays
MEPKKSSAQHQPHAMEPKKSSPRGAGAVAATATEAESPLSSLFYPPAPAANGKDQELYSIIYKGQSGSAQAGATDGKPQWAPSKSHTAYAKDGKHSPPYDTSCFGSSVHYGGRDYFYGSSTTKKATESSTDYKGDKKDPVADSHGDWWQGSFYY

SEQ ID NO: 70824 - protein, 523 aa, Zea Mays
MEAAGDEVVRALGAGFDLTSDFRMRFAKASEGRRLVELGEETRDVPLPGGGGATLRAVPRDVGVDKGDRIRFRSDVLEFNQMSELLNQKSSVQGKVPSGYFNALFELSGAWLTDAKETKHLAFDGYFISLYNLHLKASPLVLRDEVKKAVPSKWDPIALSWFIKNYGTHIIVEMGIGGQDVICVKQSHSSTISTVDLKLHLEDLGDFLFSDGKNHSPIHRKTKDGKSKVPDVFVRIVQQPNNLHLSSYSETSTKDGLTVTCSKRGGEAYLPNHSKWLQTVAKKPDAIMFKFVPITSLLTGIPGSGYLSHAINLYLRYKPDLQDLQYFLEFQVPLQWAPMFNELVLGPQKRKSSYPSMQFRFLGPRLQVSTSQFSETGGWPTAIPGGQEVQPVGHPCPAPVQCSKHDWRLRGIFNVRMARVPRQRPGVRRGHPVEEVLVRLHLRRQVQPGVAQESSRRSLYRHWRAARHEGGLVQEGPPSAPPLHPHPQLHHPEDRMDERSGGVSEGELPDDDQHDTELPVHAA

SEQ ID NO: 70825 - protein, 259 aa, Zea Mays
MYAFSTTTYVGFQAVMTEEMSEKFRGDKYDNGVITPRPPPVHYSRPSRTDRNRNYRGNYQDGPPQQGNYQNNRPPPEGGYQNNPPQQGNYQTYRSQQDGRGYAPQQNYAQGGQDGRGFGRNDYTDRSGYNGPPDFRSQTQYQGHVNPAGQGQGYNNPQERSNFSQGQGGGFRPGGPSAPGSYGQPSAPGSYGQPNTLGNYGQVPPSVNPGGNRVPGVNPSYGGDGRQGAGPAYGGDNWQRGSGQYPSPGEGQGNWQGRQ

SEQ ID NO: 70826 - protein, 235 aa, Zea Mays
MKPAARRPLLLCALAAAAALSILLVAPPPLAAHLSSLLLAFPASPYAGGPKLVVLLAGQSNMAGRGLAPSLLPPQFRPHPRVLRLAASRRWVVAAPPLHADIDTHKACGLGPAMPFAHRLLHAASPDLVLGLVPCAVGGTRIWMWAKGEPLYEAAVARGRAAVAAGGGTLGAVLWFQGESDTIELDDATAYGGRMERLVNDFRADLGMPNLLVIQERGITLISSGRLRETSSFLT

SEQ ID NO: 70827 - protein, 50 aa, Zea Mays
MLIQKDDHQPRGGEKKAGLRPPSCPQLRGCSSSLLGRGPSRAGVLSSAWV

SEQ ID NO: 70828 - protein, 148 aa, Zea Mays
MERETGTLQLLAPLLLTGGKEADLVIRGDVDLNTLSARSTSMLLRDPICINSSSSRQVSRPSRTVLRDSLRFSLYAQTVCLLVDPLLCTLSFILGMGNMDSPSRCSACAVVTAVAKGLLPNCQCSTLSQNARTPCRGRAGSRRSRVAP

SEQ ID NO: 70829 - protein, 62 aa, Zea Mays
MDLIRAQLKGQREATHEFTKRTHASTSGAHHQPCEDSYLPFAIQLYIEINVKRNLRLCKRLT

SEQ ID NO: 70830 - protein, 730 aa, Zea Mays
MDSPRGPASFATQANALLRKNLCVQKRNLKTNIGITFFPILICVLLIVLQNVINSELDKPKYKCGCVCLETSANGRCVRKECGIQYSTLDQVGSCPIPSPPQWPALIQIPRADFRAARTFSQPFNDLPDPFCRDSWSCPATVLVTGKDRAVAEAISRGLFPVLSPSLNATDLLDLFSKIVAGSDTQPWYTQLLEPAFFSGRTLYVIQPECTPVMSQTITYNTGGIPFQLNIQCVEGAPLWRETASIINHEFLKGYRQRGGQINEFIAGYDFLGTTQYGLGVNVWYNSTYNDNNAYSFISTLRVPRLVNAVSNAYLKLIKGTGVDMLLEFVKDMPKVGTSFQLDLSSLLSVLFFTWIIELLFPVMLTYLVYEKQQKLRIMMKMHGLKDGPYWLISYSYFLALSIVYMLFFMIFGSLIGLNFFRVNEYSIQAVFFFVCINLQIALAFFVASFFLSVKMATVIGYMYVFGSGLLGAFLFRFFVEDKTFPYGWTLVMEIVPGFSLYRGLYELGQYAFSGSSIGTTGMTWRSLKDPLNGMRDVMIVMSVEWAVLLILAFYLDQTSLLGGGVRKNPFFCFRCLQKKCATSLHEPSFVQQDSKVILDMEKSDVALERKVVEQFLIDPNANQAIICDNLRKVYHGRDGNPDKLAVRGLSLVLQKGQCFGMLGPNGAGKTSFINMMIGLIKPTSGTAYVHGMDINMDMGDIYTNMGVCPQQNLLWETLTGKEHLFFYGC

SEQ ID NO: 70831 - protein, 80 aa, Zea Mays
MARGEQEDPGWGITVCCAAMEASKGSRAPAGRRERRRRGAGRCAVELEGTEKQTPSRKARPGKRLRPWGSRGTCTEKFGW

SEQ ID NO: 70832 - protein, 64 aa, Zea Mays
MYYMICQGLRCYAQALVEVTPGVLHVVPTEVVSELLPCDGFRVSMGGEVGLPPGPYRTFSRSLH

SEQ ID NO: 70833 - protein, 121 aa, Zea Mays
MDDDICICNQIVGMCLSPPISLVDEGGLVSVIFVAVLLVLVAYPVAVEIVGGDLQGCERQPRRGRLLSWQRQQRQMRRRCVLSAIGHGLGRTRSCSEDNATRLADAQMSEKKYRHSKFSIR

SEQ ID NO: 70834 - protein, 198 aa, Zea Mays
MDNWQRVSDIGSHLYLIGLQQYLKLWDALGEVTLSQEADRLVWMHTAFGQFSSRSCYRAFFMGFISFEPWKRLWKTWAPPKCKFFLWLAIRNKCWTADRLQMRGLQYPVCCPLCDQEQETVQHILCTCSFTRQFWHLILSSIGLGDLTPFVVEQSFAEWWGKASKKVQRCKRKGFNSVMILGAWCLWLTRNKVVFYGV

SEQ ID NO: 70835 - protein, 132 aa, Zea Mays
MTPCAYLPTHAVLPQTSSSRTKPRSCQRRSTHIVWSSSGAKRFAAGPTSATIGEGAECMAKSCGVQRPVPLLPVAVVPLSSVASEKPVPSVGLDNLAVAAASPVVAARSAPGWDTIAALDKAWRRREPPCGC

SEQ ID NO: 70836 - protein, 80 aa, Zea Mays
MRFIPFINYSSVTQCRNGPVQEMDDGSVAHHGCIAQDPSHPTPPELLHRSACTGGRFSEMRNATTVQLKCLRWEAYYCSS

SEQ ID NO: 70837 - protein, 105 aa, Zea Mays
MFSLYYSQPYITEAKIWTLMKIVSVLKARKCTIFLSSIMFPQESGKNQLSYHLAPLFVRIFSVPLTLVACLFFSPFQVPPKCPLTNSRHWYGKMVNESTAEQADD

SEQ ID NO: 70838 - protein, 328 aa, Zea Mays
MDLYVFATPYRITWDYYFAAREHTLEIKSWEEEAELKYVKEHGISIFLMPSGMLGTLLSLIDVLPLFSNTAWGQHSNLAFLEKHMGASFEKRTQPWVANIRKEDIQSGDFLALSKIRGRWGGFETLEKWVTGAFAGHTSVCLKDEKGDLWVAESGYENEKVMAVMSMWTRLQPVYAANMWNEALNKRLGTEDFDLQGIIMEIERRGMSFDQLLTIPEQDEWVYSDGKSTTCVAFILAMYKEAGIFTPFSESIQVTEFTIRDAYMLKIFEDNPARLPGWCNAGTDKLPFCQILGEYRMELPEYNTIEPYAKMNENCPSLPPTYKRPARC

SEQ ID NO: 70839 - protein, 178 aa, Zea Mays
MLRHAARRLVSRAVAPPTARRALATAEVPAEAVEDSTFVEAWKKVAPNIEPPATPLSLMQPRPPTPATIPTKLTVNFVLPYKSEIANKEVDMVIVPATTGQMGVLPGHVATIAELKPGVLSVHEGNDAIPVDQIDPALVQKGLAEFTAKLGSASTDLEKAEAQIGVDVHSALNAALTG

SEQ ID NO: 70840 - protein, 258 aa, Zea Mays
MRGIFIAGSSLVGVAIKAPRIMSKNFIRARFTVVVDSFIKTGSRFGEAFLESASFLAIRPLFELVSGSHRLPVIVLHWSVGSEVHSKKGGHLFVYGGDDMGSKEVLTVLSQESTAGLESKRCMSRTDLKLVGSFADMILIPDTRVPDKRRTSALFILTNPGQLNFYDGGSLFSVQNSKEGNPLPEAQKFPVAIPTLDPNITVTGLYSLTESEFPNISVKKFDATKNVGHFISENMKWPLTGGVPNELSLNEDHAVERI

SEQ ID NO: 70841 - protein, 227 aa, Zea Mays
MSEDDMPMMMKLVYFGETERKIVRFAGEETTPAPKNEEVVVFKSFFRAGLRFPLNEMIGEVLKNFEIYLHQLTPNAIVRLNVFIWALQSQGMSADAEAFCRVHDLHYQTKARADGHHENFGCYNFAYRKDTKASVLSYRTKWPTGWKNEWFYMKADEKKRGKLMTMVMSPLSLNFGMTRPLCNMQLGSPCQLAEVEFRVVAEQISTRDLVQEYLANRTYPKSSGWEC

SEQ ID NO: 70842 - protein, 332 aa, Zea Mays
MGGGATAWPLAANRGGSEVVWSQVRGVELRNQEQPFDMGKKKKRNKNVPAVVWYPTRVIEFLGRRTPIILKEKDTRCSLVAICNVLLLGEKITLDLDIKKVLESHLIHLFQRPLLCGNTQMQLEQNLELSEFNKQVLGVLPKLTCSLYFDVTFSSSCGLEKTFETALFGFLGVPLRHGWLVDPQDAELDSSIRGSSYSKLSYNLAIYESIRPKTNSGPQKHGRYEDDMFYSALAFSKTGSEKELDSTSCATISTFLQGPQLTRYGFSSLHNDLRALQPTVLIWNENLITISKFEDKIYVLLNDLSLLRTETDAVWERLTQFLAHGLVGHARH

SEQ ID NO: 70843 - protein, 626 aa, Zea Mays
MNADPEDVDLKYLCGYMYHNLCEYQKAAEIYEQIVRIYPANSAVRKVAAQIKRAQLHLGSQQKLPVQLQAKEVICHAYCGDMKHAEIFLRDVRLEPSKENIDVLKELASNLEKMGRYEYAVKFYLLIENVATQNDGGLCFDHKEMGSWYVKAAQCYMILGDKKNAIPYFYKALQSMKDNIGIRLTLSSLLIDDDKTDEAATLLSPPKIPELQSANTPDQQKPWWCDGKVKMALAKLYYNKGNLEDFVDTIFHPILETLNVEYANRKVKSMRKLPNIVLHERVKVLGEQRPDSVFQGLRPIASPDELQKANRAKKLIEKRTAANEELKHDYLPRTKQVPPVPGLLTNVEHHQLVLNLCRTLALLQRYWDALQIINRTLKLGNDALTGDKKEELRSLGAQIAYRAPDPSHGFKYVRYVVQQHPYSLAAWNSYYKVVSRIEDRFPHHFKYLLRTREANPDCVPPIIISGHRFTAISQHQSAARDYLEAYKLDPENPLINLCVGTALISLALGFRLQNKNQCIVQAFAFLYRYLRLCDNSQEASYNIARAYHHIGLNTLAAVYYDKALSTEEKDHPIPKLPYEAGSRAPEDLRPGYCDVRREAAFNLHLIYMKSGATDLARRILKTYCTV

SEQ ID NO: 70844 - protein, 749 aa, Zea Mays
MTLIHVLLDNNNFTGRIPPTLGLLNTLEVMRFDNNYQLTGPVPSNINNLTKLAELHLENNQLTGPLPDLTGMIALSFVDMSNNSFNASGVPSWFTTLPSLTSLYLENLRVTGQLPQALFSLPAVQTLRLRGNRFNGTLTIGSDYSTQLQLIDLRDNQISQITVGGSQYNKQLILVGNPICSPGTGSSEKYCASPGQSNQAAPPPYSTPMNCSGLPPPCLSDQLVSPGCVCAVPYRGTLFFRSPSFSDLSNGSYWGQLETGIRAKFRSLSVPVDSVALHDPSVNSVNNLQLALEVFPSGKTQFSEQDISDIGFILSNQTYKPPSVFGPYYFLGQPYSFANVVLIPSKSKANNRLPLIVGASVGGAVLVAIVLALVTIVARRKKRPKQNEERSQSFVSWDMKSTSGSSVPQLRGARTFNFDELRKITSNFSEANDIGNGGYGKVYRGTLPSGQLVAVKRCQQGSLQGSLEFRTEIELLSRVHHKNVVSLVGFCLDQAEQILVYEYVPNGTLKESLTGKSGVRLDWRRRLRVLLGAAKGIAYLHELADPPIVHRDIKSSNVLLDERLNAKVSDFGLSKPLGEDGRGQVTTQVKGTMGYLDPEYYMTQQLTDKSDVYSFGVLMLEMATARKPLERGRYIVREMKVALDRTKDLYGLHDLLDPVLGSSPSALAGLEQYVDLALRCVEEAGADRPSMGEVVGEIERVLKMAGGPGPESASNSMSYASRTPRHPYGGDSPFDHSNSGLPSARVEPK

SEQ ID NO: 70845 - protein, 67 aa, Zea Mays
MEEAKKAEAAELERRKTELSPPPKPYDPEADPTLKGILDEFRVVNVAIDEAGNTLLNEAAEKVLKED

SEQ ID NO: 70846 - protein, 140 aa, Zea Mays
MLSAPTSQQNAPNPARRKNHGRSLPSLVGHRVHPVKPIRKGKGVLGHVHTPHKTIGRFGSEHRTMKREREGRRRLPPSDSRYAGVQKLWIPREAHRGLSDEYAVLPGSRIERPNDDFSSHFNVHRHTTLDRGRSLWFRNP

SEQ ID NO: 70847 - protein, 453 aa, Zea Mays
MRGFQNDSGSLVSDADNKSNPEESNLSHEIDDKENVGKFLYLEGIEYFMWCTYDVHFYASFALLDLFPKIELSIQRDFARAVLREDNRRVRFLADGTWGIRKVIGAVAHDLGAHDPWHELNAYNIHDTSRWKDLNPKFVLQIYRDFAATGDKSFGKDVWPAVCTAMEYMEQFDHDGDGMIENDGFPDQTYDAWTVQGVSAYCGCLWLAALQAAAALAGSLGHDDYAERCMTRFVKAKTVFEARLWNGSHFNYDSGTSYSSRSIQADQLAGQWYTASSGLPPLFDEDRIKCTLQKIFDYNVMRVKGGRMGAVNGMHPNGKVDETCMQSREIWTGVTYSLAATMLLHGMEHQAFTTAEGIYTAGWSEEGYGYWFQTPEAWTIDGHYRSLIYMRPLAIWAMQWALSPPRSILEAPKVNTMDRAHISPGTFQFLQDSVRKMTPKNGCFGNTVINLDC

SEQ ID NO: 70848 - protein, 53 aa, Zea Mays
MEIGLGASPSLPESLGGSSRSSQTTGYTGVVLLSQWRSSLWIGCKATPSLTGK

SEQ ID NO: 70849 - protein, 270 aa, Zea Mays
MYTLPVRATTSSIVASLATPAPSSSSGSGSGRPRPRLIRNAPVFAAPATVVGMDPTVERLKSGFQKFKTEVYDKKPELFEPLKSGQSPRYMVFACSDSRVCPSVTLGLQPGEAFTVRNIASMVPPYDKIKYAGTGSAIEYAVCALKVQVIVVIGHSCCGGIRALLSLKDGAPDNFHFVEDWVRIGSPAKNKVKKEHASVPFDDQCSILEKEAVNVSLQNLKSYPFVKEGLAGGTLKLVGAHYDFVKGQFVTWEPVGVHAHSSSFRATPID

SEQ ID NO: 70850 - protein, 468 aa, Zea Mays
MASNADQHAAVVSAAPSDSPVGAKKAGAAAAVWKLPAAAAVPVAEVVENPIMDAHSWPALPGLSSPPPPPPPHAGPTAKASPKAASPAPTGAATSPVSLGNPGAPDASHGNDARVRNPVARRALVMPAADGLEKSAPAPEPSPVYVPNARSNGADPHQNGRPGSHHHGRGGGYGGGNRRGNGGGGGRRGSEHHGGFDGQRRGGGRRDGHGPVHQLRGHQPTYIKAPVVAGAPPPPPPFVSPATPQTPPYGPPMGFHDMSAHVYYFPAPTSEGIQGLPFVPLPASPQAVLIDPSRKNLLEQIEYYFSDDNLCKDLYLRQHMDGQGWVPLSLIAGFRQVQKITNNIQFILETVMLSNIVEVQGDKLRRRGAWENWLLPKLNYSAGSSSGSMTPVTSNIDALASQFRSVGLEGATYHPSMPGMSGEALLTRSATSVSLGYHASTFGGLQSNGSEPLFGPKSARNLLRSDTF

SEQ ID NO: 70851 - protein, 829 aa, Zea Mays
MEIGSIVCFCAVHSHGFKMLFSLSAVLRHTPCPPVGFTILKAGLNKSVLLSVYSSQNSRDGEDHRNLHEKKIASYLSKIGQKFLLVYRSYGTYVAFLTILLTLYLVTPNYISFGYLFFLLFWIIGRQLVEKTKRRLWFPLKVYATVVFIFTYSLSVSPIFAESVSKFLKLYPDLGFDPEASLLENVWQSLAILVVMQLYSYERRQNSDKNFGVSDASESGLLGFLRRFLIWHSDKILSVCVFYACLSSISLSGLIYLLGLIVFSTLPKVSRIPSKVYLVYTGLLAASEYLFQMVCKPAQMCPHQHFYGLSVFLGLKYYDSGFWGIEYRLRGKVLVIVACTIQYNVFHWLDLMPTSLVHKGKWEEPCQLFISSNPPYSPVRSNEESHSSNRFTSLFSKVQGLIGSSSSSSSSVGPGSIHQKLEYVDNAIEGSDEDKRHSFAKIWGLSKESHKWDKKRVIFLRRERFETQKTTFKCYMKFWIENLFKLRGLEINMIVLLLASFTLLNVVSIFYIMCLVLCILMNRDLIQKLWPLFVFLFASVLILEYVALWNDEITWYHGTNDIEVHCRECWKNSRIFFDYCSKCWLGIIADDPRMLISYYVVFIFSSFKLRSDHFSSFSDSDTYRQMMSQRKNAVVWRDLSLETKSFWTFLDYVRLYAYCHLLDIVLALIAITGTLEYDVLHLGYLGFALVFFRMRLEILKKKNRIFKFLRMYNFGLIVLSLAYQSPYVGQFSSGKCDQIDYLYEIIGLYKYDYGFKITSRSAFVEIVIFLLVSVQSYIFSSSEFDYVSRYLEAEQIGAMVREQEKKALKKTEQLHHLRRSEEHKRQRNM

SEQ ID NO: 70852 - protein, 799 aa, Zea Mays
MMHSNSLDNAPTQSLISVVNGILDESIERKKGEIPHRVVYLLRKVVQEIEHRLCIQAEHIRSQNVTIKTREQKYCSKIKALEMLVNGTNEENQMAINRLQIVKNEKSQIEEKKELCEKDVQRLMKEKEYSKSIIMNLTKDMEAMNRLHEQQLEQIGRKAKEMEEQLTTRVKEVEYLLLQSNKKVEELEIASRLKSQLWDQKENIFQSYMDNQQLVIKDIRILSQSYENDMYALQMQWRNEISNLGSGLKCLVDAAENYHKVLTENQKLFNEVQELKGNIRVYCRVRPFLSGQDKKSTTIDYMGENGELLISNPFKQGKDGHRMFKFNKVFTPFASQAEVFSDIQPLIRSVLDGFNVCIFAYGQTGSGKTYTMSGPTTSKQDWGVNYRALNDLFDISLSRRNAFSYEVGVQMVEIYNEQVRDLLSNDIAQKTLGIWNTSQPNGLVVPDASLHSVKSTSDVLDLMEIGQANRAVGSTALNERSSRSHSILTVHVRGMDLKNGSTSRGCLHLIDLAGSERVEKSEVTGDRLKEAQYINKSLSALGDVIFALSQKSAHVPYRNSKLTQVLQSSLGGQAKTLMFVQINPDVESYSETISTLKFAERVSGVELGAARSNKEGKDIKELLEQVASLKDTILRKDMEIEQIQVIKDKVKSPNLLLDRNVPGLTKTTANQPSQLLSGERMLKSSDRVLSDRQSYGEVNVDPNHHVMDTAPVSIDEAGYENNASDDGLSGETENDNSAAEMTAERLHRFPSRISRFTLTKNGQPSMSRSNPKDAKTPSNTKAPSSRLTGGSSARSKRRQ

SEQ ID NO: 70853 - protein, 86 aa, Zea Mays
MAARFIPLRVAPKLLPLPLSAPSSSARRRQVPARLPPHDARPAGVRPIRAPLCSSPSRAQPKSPARVPAPSSSQRRSQKFLEAWAI

SEQ ID NO: 70854 - protein, 51 aa, Zea Mays
MRCLCTRRGRRVRSSATSWQAPRCPQRRSPNCCLPLFSLSLSLSLLPKMHV

SEQ ID NO: 70855 - protein, 404 aa, Zea Mays
MRSTVVPLYQPARLAGLIPVMQSYVDTLAANIAACPDQDCVPFCQLSLRMAIDIIGRTAFGIEFGLSKNAAGTGSSSSESPGGGEGEGDVREFLREYKRSMEFVKMDLTSSLSTILGLFLPCVQTPCKRLLRRVPGTADYKMDQNERRLCSRIDAIIAGRRRDRATRRRCGPGAAPAPAPLDFIAALLDAMESGRRRRRRCRCQQGLRAGGQARARAGVRAPHRRHQDHGVHAVVGGVPGLVPPARGGQAAAGVGRLRAAPRARARAGRRRAPERVPLPRPGHQGGHAVLRRLAAHRQADLRARGDRGLRSPQGRVRLAGAGCAGPGRGAVPGPGGVPAGAVRAGGGGGAGAPPVRAHPLRRRAQGVHRAQVRAATGEACRGGALPPVRVPTLAVHGVAHPVRL

SEQ ID NO: 70856 - protein, 285 aa, Zea Mays
MRCEEKEGKHWRAGGRAPVSCGCGAARERDPFVREPHFQFQHESSSNPRLLLASHRHSAGLAMPGAVALAPTFAAASSSAAAASTLAPNPTSRGDPLIIRLCRNAPASATPLVPLVATRRYVRGCRGAALVASPHHAPNPRLRFASAAEGMAAEASTAGAASAAEAKPFAVLFVCLGNICRSPAAEAVFRTLVSKRGLDSKFLIDSAGTIGYHEGNKADSRMRAASKKRGIEVTSISRPIKPSDFRDFDLILAMDRQNYEDILNSFERWRRKEPLPDSAPNKLFY

SEQ ID NO: 70857 - protein, 82 aa, Zea Mays
MGRYPTTNDSDPTGALDHVFRRVADEDGGRCGPALHLAPRKALALSAAPPLPGAQQCGRVRSSGQRIADRHRARGQTPRRTR

SEQ ID NO: 70858 - protein, 244 aa, Zea Mays
MAERKREETRSSRAASVDARARPELHLDIREEAAKKNREPPTASNIRRHSSSLQVCHWLLPSTAGSVATSTPSLSSSAPSQSWRRHKNRLPTASLRPVQPAATTTSSCSLSSPTRGVSGAAPDEIAGGLMEIPIIYDALGDLDEAQKLLHMALRLLEGSSREWSIIAGVVAQMGVLYYMVGRYANSGNSFKSADANSRAIDEVAQLFEEARAVLEQECGASHPNTLGVYNNLAAIYNAMGSPNL

SEQ ID NO: 70859 - protein, 338 aa, Zea Mays
MDAGDDEPPVLLDRAARASRGKRITKLLEDEVEQDEAFWNQEALKDEENDDNYVEEPDAGDEFDSDFGEDESETDDEPEKEVRERLPIKKRLMFPGKTLRKTNVKKKKATPKPEDGTKADKSADKPSSSTQADLPDELEAEKAIRKSTRTSVIVRQAEREAIRAEKEATAKPIKRKKEGEEKRMTQEEMLLEAAETEIMNMRNLERVLAREEEVKKKAVVHKDTYEGPTIRFFSRDGESRLEFINGASFGSELCTTSSPYPEKPVCVVTGLPANFLKEEADRKRPNMSNMGELFESITGGHLMPKKRRVEIRSPNMLGGSRHGGRTWRIPAFDMVDED

SEQ ID NO: 70860 - protein, 214 aa, Zea Mays
MEGVPGSALDASKKSSPRRAFSRPIKTNLRVAESSAFLAYVKPSTPATSSFDSELQRGGSRLDSLDNQGNCSSATDRSDTGTDVNIRSKEAFEMPAQYPMFNPSGMSTHSSHLPTQNVWSSASSTPPVPEETCSRSERRAAALAKFRLKRKERCFDKKVRYVNRKKLAETRPRVRGQFVRQPTNTDVISIGDDISEDEDDDPSSREVDMVSSPE

SEQ ID NO: 70861 - protein, 85 aa, Zea Mays
MHPPLRSLTSCLAYRLFDKMLQLSFVTDLMNPDRHCCRALRLQHVREAVVALLSFVSMWWVQQCRRSLHGAYRRLCLPESDPRVE

SEQ ID NO: 70862 - protein, 354 aa, Zea Mays
MGKAKGKQRQDKFYHLAKEQGYRSRAAFKLLQLDARFRFLLTAHSVLDLCAAPGGWVQVAVNHAPVGAFVVGVDLVPIRPIRGAHSLTEDITTTKCRAAVRRLMDSNGVSAFDVVLHDGSPNVGGAWAQEATSQSALVIDALRLATMFLAPKGAFITKVFRSQDYNAIMYCLKQLFEKVEATKPTASRSTSAEIYIICLKYKAPAKIQPELLDIKHLFSVVPEQTKSRDVMDGRKKRHRDGYEEGNTTLRKVGLASDFIWSDAQLEEMLDEAYERFVTRKGGEIKQERKRAKRINPDADADLLEGGEDDGVAEMDQDFDEDQDLDEHQDQETNPLLLALDEQRPTKEQIVKQMV

SEQ ID NO: 70863 - protein, 656 aa, Zea Mays
MLNGSNKDVDSCSEDILLKVEEILLSCKEIKPADRDYKRTTRPELCSKWLALLTMEKACLSAVALEDTSDMVLELGGNFKETLRQLGGLDDIFNVMVNCHSELEKLVKDASTTVVEGKEGAPLQSTTLLLKCLKILENATFLSDNNKTHLLSMSRKLSPKCRSLSFVGVILNIVELLSALSLLQKPSTVSRKADPKNTKVCNGACSDSRGLSLLNHHCKCNNSKKKSILLNRRCQYCSSTKSEASHVTLSSSSDVSQSERILNCSSFSSNGTSSGSFGVKHINGASLKLNVRMDRSKAYPVRGSTGWISMKAQTSDWNSREMAKKRRLSENVRTDLSNGGDDPFAFDDIDQEPSNWDLFGPKRKSPQKRAKRTNGEVLDDCGTALMGSPKLCQPEDIYQSVATSGSKVVDESNLLEDCLLASVKVLMNLANDNPSGCEQIASCGGLNNMASLIIKHFPSFDFSMNSNNQMNESVSSGDPLSSQNSKSPQIKTKQLRDYELDFLVAILGLLVNLVEKDSLNRVRLANARVSVNLSQNPDSKEVQRDVIPLLCSIFLASQGTGETAEAISPDDEESLLQGEREAEMMIVEAYAALVLAFLSTESMKVRGAISSCLPDNNLKVLVPVLEKFVSFHLQLNMMTRETHSAVTEVIERCRLS

SEQ ID NO: 70864 - protein, 127 aa, Zea Mays
MIKSWVCRAIPSVCAYLFLPSLPRTQRGRHPHRHRPQVERIIRRRSTSGVGSRAWPIVCLELGALRGRRWRGTCHRGQADPTDALIYAVRSREPKDHPGTWNLKSQASYALDHFYYSIMFFIVIYHA

SEQ ID NO: 70865 - protein, 458 aa, Zea Mays
MDDGSSNKVVEDVAEEDPGRRGGPWRTDEADANEKAPRPSRRVASLDVFRGLTVALMILVDGAGGEWPVIGHAPWNGCNLADFVMPFFLFIVGMAVPLALKVRRRRRSSRPSVVHAMHAHRIPDRGRAVRRVVVRTLKLLFWGILLQGGYSHAPDELAYGVDMRHVRWGGILQRIALAYLVVAVLEMVTKDGAKVHQDQPPGSSGRFSRVFRMYLSQWIVACCILVVYLSLAYGVYVPDWEFRVRNADSPDYGKVLTVRCGTRGALDPPCNAVGYIDRRVLGINHMYQKPAWRRHRACTDDSPHEGPFREDAPAWCVAPFEPEGILSSLSAVLSTVVGVHYGHVLVHMKSHTDRLRQWVTMGVALLVLGIILHFSHAIPLNKQLYTFSYICVTAGAAGVVFSALYFLVDVVSLRYAFAPLRWVGMNAMLVYVMAAEGVFEGFLNGWYYESTNNTLFGA

SEQ ID NO: 70866 - protein, 658 aa, Zea Mays
MAAAAPAAGKGKRKRHLSEDDVCLLQRYNPGTILTALQEVAQHAEGRIIDWRAVVAKSATGITSAREYQMLWRYLAYHHDLNESIEAGDLPLGDDSDLELELEPNPSETKEALSEASALAKALISRSSREQASGHRINLDVPALNTQNEKIVRVPSKQLAQSHRVTNVTCPVSNPKQLSHIVPSPTHLDPNGASKKRKKAKAWSKEEDADLAAGVQKYGEGNWEVILHKCNFDNTRTPDQLSQRWALKRPGGSTKPASTKHASVGSEERSATIKALHLAVGPMPVSSALRSGREQSIQHKSTAFAPKMPQVRSAVTPSLAPALALPVQPLRVAAEVQSPLRHGQQAPGQGVSAVNQSGPPAGAETKKALGTTLAPVPCDSEENEDGSEFCAITLDDLFPEDAKQPETVDTKAKQPETTGPKAKQPENADPKAMHQETMDPKSKQPDTLKVGILDPKDKDMLEFDQYVASQGAHLNTDDLNKSKCTNSASQAQGLVGSQKNPLKLTPVDGKANPVTAAGRGKPVAAGVASTGKKATIPISHLAAGTPRGIVDTVNANAPIRRTLTRRAAALVPAGCQAPPPKHAIDAKGCQMTNSIATFVSSGVPASSQASTPAKDANKASPPSSSCQPKPDSVAVNGAIRAVKSVAKKGNLPAAAARQ

SEQ ID NO: 70867 - protein, 732 aa, Zea Mays
MRSKCAMAISSSTSRTQDLVPLLCLLLMAAAAPQHSCASPPLPVTLPGCPDKCGNISIPYPFGTKEGCFKPDFEVLCNDSFHPPRAFIQMAGAKITVDDTYYKTNEDGMPDNDIGSSEWPIELVDVSVSEGKARVLGAFSYDCKMNDTYHAVRRQEIDLGYWMPFSMSDADDVLMGIGSNVVAKQTSGPQCQSYLLYQLSTRKTDDPVNGSCSGQGCCSANLRSGGMAATEVTIQKNTKDDGGFYGDGVSCSYAMIVDKSWYNFSSPDVDSDAFLRRNAAGVPVVVNFSFGVDGCPNASEPTPDDFACVSNYSTCIERPPVLDNVSIPYFCSCSAGYEGNPYIHGGCQDIDECARPHMYPCYGGKCKNTPGDYECSCPAGTKGNAKQAPCTDLFPLPAKISVGGIGGLFLIALMVFVVLIRNEKRKMAEFFKKNGGPTLEKAKIIKIYRKEELTPILTRSNFIGRGAFGEVYKGLLDNQLVAVKKPIDGNVAQNDQFANEVIIQSQVIHKNIVKLIGCCLEVDKPMLVYEYLSKGSLDDILHGSSGVLLTLEQRLNIAAESAEGLAYMHSKTGKIILHGDVKPANILLNDCFTPKISDFGISRLIVIDKEQTDHIIGDRTYMDPVYLRDGILTDKSDVYSFGVVLLELISRKKATYSDNNSLVRSFLDAHKNQKEATELFDKEIAKPDVLKILASVYEIAVSCLNLDADERPNMAQVEASLLKLKADLGMIN

SEQ ID NO: 70868 - protein, 231 aa, Zea Mays
MASPIPREWVGLQQFPPATQTELHELLGKLKEEDVSTLTILVMGKGGVGKSSTVNSIVGERIATVSAFQSEGLRPMMWSRTRAGFTLNIIDTPGLIEGGYINEQAVDIIKRFLLGKTIDVLLYVDRLDAYRMDTLDGQVIRAITNSFGKDIWRRSLVVLTHAQLSPPDGIEYNDFFTRRSEALLRYIHSGAGIKKREYGIWEAGRQPPLRQGVEDFPTLVDRTMHLREKQQ

SEQ ID NO: 70869 - protein, 557 aa, Zea Mays
MPGSSAGSSSGVMLPGVGASLGEICRDYMNGRCTKVETDCKFTHPPQQLLMSMLAATSSVSALGHAPLAPSAAAMAAAQAIMAAQALQAHAAQAKAAGSVHKADEADALKRTVQISNLSPLLTVDYVKQLFGLCGKVVDCTITDSKHIAYVEYSKPEEATAALEFNNKNVGGRPLNVEMAKSLPSKANNNLPMMMQQAIQLQQMQFQQALMMQQSIATQQAAARAATMKSATEAAAARAAEISRKLKAEGFGADNMEEKHAKGKSRSPSPSTRRSKSRSRSPIKYRRSRRSRSYSPPVRRSREQRSRSPSKSRHSKYGSDRSHRDDKDRYSRSGRRESERSRDHHSSSSRRNRSKSRSPRHKKPSRVDSRSPKKQREESLSPSKSRSARAGSRSPRHHKGSKSSPTRDRHSRHSRHSRSRSPGRKHRHSDKRDSRKSEIQDDKRRSHRGSRHDKDESSVKDEGERSHRSNRGDKDERSVKDPVEDKGMDTKVVAHKRSSTVSEDEILNNNSSNHKKYRHEVGLEVDGNDVCSAAADIDRKHETGVDGSLGGAAESAM

SEQ ID NO: 70870 - protein, 688 aa, Zea Mays
MPMGALQVMLLRLVLLAASAATTAVTVTAAPPPSEVAVGALFTYDSTIGRAARLAIELAVDDVNADRTVLAGTRLNLLAQDTNCSGFLGAVEALQLMERNVVAVIGPQSSGIGHVISHVVNELHVPLLSFAATDPTLSASEYPYFIRTTISDYFQMNAVASIVDYYQWKEVTAIFVDDDYGRGGVSALGDALAAKRARISYKAAIPPNSNTDVINDVLFKANMMESRVMVVHVNPDTGTRIFSVANKLQMMATGYVWIVTDWLAAVLDSSTSRDRKEMSHIQGLIVLRQHTPESVAKNKFISKWNNAARNRSITSGLNSYGFYAYDSVWAIARGVDQFLNNGQQINFSTDPVLHDTNGSSLHLSTLKIFDGGEQMLQQLLLTNFTGLTGRVQFNSDRNLVHPAYDILNIGGSGSRLIGYWSNYSGLSVAAPEILYQKPPDTSSIAQRLHNVVWPGDSTTTPKGWVFPNNGQPLRVGVPIKPSFKELVAAGKGPDNVTGYCIDIFNAAIRLLPYPVPCQFIAIGDGRKNPNYDDIISMVAANSLDAAVGDFAIVRNRTKIAEFTQPYIESGLVIVAPVKQATSSAWAFLKPFTLEMWCVTGALFIFFMAQSMVVLRFEISCSRRITSADNSAMQRLSCACSLHPWHSSDLSRSTLASKSPIGSLLPLLLPSCLEASWCLGTPCGPVDLC

SEQ ID NO: 70871 - protein, 366 aa, Zea Mays
MCICICLQDTHGREKQKMEPRQEHEKRVVLETIVTLLPKERNSMSVSFLSMLLRAALCLDTTLACRLDLEKRMAAQLGQAVLDDLLIPIFLPDAGNTFDVDAVQRILVGYLEHEAEADRLDYNTDDDFTSTASPPNDVGMVGKLMESYLAEIASDVDLPVDKFTGLAEMIPERARFNDDGMYRSIDIYLKAHPYLSEAERKTVCRVMDCQKLSREACAHAAQNNRLPVQTVVQVLHHEQRRLREAPTSSFYGGESPTPAPSLQGRHGRSVPDEMSQLQRENEELKMELLRLKMNLRDPSAPPQHSDAPPSGRRPLPKKAAGGSGGFINNVSKKLGRLNPFLRPDAVGGAKVRTKPSRTKDRRHSIG

SEQ ID NO: 70872 - protein, 507 aa, Zea Mays
MAASLAAAASRLAATGGELSWSARPCPGSLVASFPSAGRLRRPASGVRCGGGVLPAAAGTGAEAEEGGRFVGWFREAWPYIRGHRGSTFVVVISGEVIAGPHLDGILQDISLLHGLGIKFVLVPGTHVQIDKLLAERGKKAKYAGRYRITDSDSLDAAMEAAGRIRLTIEAKLSPGPPMLNLRRHGVNGRWHEISDNVASGNFLGAKRRGVVGGIDYGFTGEVKKIDVSRIRERLDRDSIVVVSNMGYSSAGEVLNCNTYEVATACALSIEADKLICIVDGQIFDEHGRVNRFMSIEEADMLIRTRAKQSEIAANYVKVVDEEDINHVRCLPMKHGTEHGFAIGGEERLSRSNGYLSELAAAAYVCHGGVQRVHIIDGTVGGALLLELFTRDGVGTMIARDMYEGTRMAREEDLSGIRKIIRPLEESGVLVRRTDQELLEALTSFIVVERDGSIIACAALFPFLEDKSGEVAAIAVSEECRGQGQGDKLLGLFVAALRSARSIPCLW

SEQ ID NO: 70873 - protein, 759 aa, Zea Mays
MRSDSPVFNFINNLSPIPPPKPLDSAHNVQLFKSSDLAPVSSIFASPHVNPTKGTKVLIRDESVQLPHELHSPSSVRTRIGTSGSFRMIRCKDIVPENCNITCQLNEASIDSSDHTSSSTGQLTQSIKDAAGSMESDKDQCAGGKIDLTMSQECTGLEGMNLDESSPDRMDSSHSGIVVHENQLSEQNNDEPAAYNGVYMITHQSSSDMLTLAVPSGTEAQPMNDTQKADNPYPCESLLDVQSSGNCTQNSVHEPHLYWNGAVEGAAVAYTPQALPGALQSQLMPCNKLNEPKDYMPTEQNALSQHLRGMRRRSLFNEKAGLSNKGVDKASDHHPVNSTTPKCKTISGDNSKTLRTPPCALPGIGLHLNALAATATPKEKIVPQDIQSTINESSNLIGPAGSSPAPSEQNIINDDFTQTTDVATAEASSQGSPKKKRHKFDSGDGTSCKRCSCKKSKCLKLYCECFAAGVYCSEPCSCIGCMNNQSHTETVLSTRQQIESRNPLAFAPKVIHTSEPGLELRDFSNKTPASARHKRGCNCKKSSCLKKYCECFQGGVGCSISCRCEGCKNAFGKREGAAVLSIEEPKQGLEEKDVCVKEEKSEIEKQLVVYQTPDDAPAENVLTTPSMVQCRPLACRPPPSSKKSSKKPRSSTKLTGHPSRLCNLQAPPKTDTMLSPFENYAEMVLGDSTSDILKGNSSPQTSVKVVSPNKKRISPLRMGTGLSPICRSGRKLILKSIPSFPSLGGDVNNEDPETKLPAP

SEQ ID NO: 70874 - protein, 367 aa, Zea Mays
MEGLIKGLVHVAIDAVEDAVRERDHGRADDDEVPRRRAAQSSDPDDDGEEERDERSRSTWAEVVSEQKGSDPDERRDHRSSGRDNRHERRDDEGWKRADGRNQQQHHAGRQNQCEGEERWDGSGSRRRQQQQQAQGYGNQHQEEERINDGGWQTVGEKKRHGRPQQSEAWNGYRKPPSEQKYSEDVGHIHQGLNFEPTREELNSLSKACSRLWELDMNRIVPGKDYIIDCGKGKKVYQKGDMASESLFSWLGDDVLRKPTYSRFCALLDNYNPHQGYKEVVTQQDKHEEIAFVEEIARTAPIKYLHRYLVQKGAVPQDYEDFKRMLTSLWFDLYGRGGNSSCSSAFEHVFVGEIKGRGQGESEVFRD

SEQ ID NO: 70875 - protein, 132 aa, Zea Mays
MGDGKEGPRLGRGEEQGRGRQAGAPASSNQEQGAAARELGQALGLGARRRDGGRREEWLEKMTRAGTRARAESSKPAWPWKASFLEPRYHQDWASEKMNRSALELLSRRSSLPALELLCQVLSDGASRRSSP

SEQ ID NO: 70876 - protein, 716 aa, Zea Mays
MAPAKRKRAAAAAAAAAAAAAKWKVGDLVLAKMKGFPAWPAMISEPEQWKMPSTKKKPLVYFYGTKQMDAQPQNCYTRSRVPSLRKSRSSISVESRKAQGSDNVWLHSGRGTSNQPVTLGTTCNGSKMLNPPVKADSTCNSEASENGTSETELKSNGTSNLPMNTEVIFRRIRKSDRKPVPHYEDCTTPNKDELRAEYSEILSDSPNSKNEVCKSDGDEHLPLVKRARVRMGRSHLEDSPVDEVDVSNKKPELTTTSDQCDRNGKPASPVNDYSADQVSTVVSSASNPSCKSDMPILSKEGHLPWKNKEYHPKILALDVEAALPPSKRLHRALEAMSANVAENVKNIPEVTGPNEMALNGSLLTANNHSNKSADAVVTVSNKPVIVQCSEPSLDTQFKHTQSGKCTSESTLQNNTIPDSASVPSKENDIMLKENDTNGSWVCSELDNGSCGKTSALCMILNRPGLDVTQTTSVPDRLSSSFEKESENVATSSVKETKPFGSAVCEVDRSAEAEQIDHSNNNVISNTIRHSETIVVDSVNNVGDTASNSSMATKSSSIQSDADTRTSEVHTFSSLALKELNHRKIKDRSTSPDSMPMKELIAVAQARRFSRLTSFPDIFLNAKYIPERATNTPPKEGSHRQLSPSNRIFRSTSGNDNVHSRSPFDIIQQKKLAGHVEANAARRSFKDFLSTLTRTKESISRATRLAIECAKFGIAGN

SEQ ID NO: 70877 - protein, 157 aa, Zea Mays
MEGKPARSVDLAEHEKEAIKHLYLLTMKPVIYVANVTESDLAEPDSNSHVKEVAKAASDLQSGMVTISAQVEAELAELPLEERVEYLKSLGVAESGLGNLVKATYNLLGLRTYFTTGDKETKAWTILSGMTAPQAAGVIHSDFQKGFIRAETLVLLE

SEQ ID NO: 70878 - protein, 124 aa, Zea Mays
MYMKFSVLALECHAYVPSVKGQLENIPLHQVLGTSFASKGIALPGRLGETGCPLCRSFIKAQTIDDDDSGQCQRYIHIGSDANQKEQSGTNINKLGRQSPIEVERHGGHPAAEPGMSQQLLIGA

SEQ ID NO: 70879 - protein, 161 aa, Zea Mays
MNAASTAAAAPAPAATVQVPRGQVDLIDFIDWTGVECLNQDSSHSIVNALKQVVKLHSALFKGPEEEGPKTVKLFSNKEHMGFSNVNDYPPSDTLELSSDHLIENKLLPLKYVKFQNVRSLTIFIEDNQSGSDVSKIHKIALYGTTVDTTNMKDLKKIEEH

SEQ ID NO: 70880 - protein, 367 aa, Zea Mays
MNRYRAFAEGVVVMVCPVLLAIALKKVDLKSEEHGGAVPTTMLVVAAVTLVAGSPHAATMLLAPLSSTCLVALACWIVHLILDSWAFPAVGALVGLCSAIRTVMHFTTRAGQGDAEMEYCDRLESSLDFLVGITALLFLGLEGLALEGQINSSSGRLTTPIGTSFVVCVFAASLMLVETMPPRRLVRYLTETIDILTGFAVSLAMFFIMYPLMGLRALLLLAAPFLILMAYVFYVAIGKDDGNNNHQVASANGDEESSGVSSSRRSGAAADGDNKPASLELTKVTFAGFLAVSIPSISKGSVTIYSECFLHLAAAAVVSGLVWRLLTHYKKSQTTVATVADIASFCTHLCVAVAVIPFTIMAGNALS

SEQ ID NO: 70881 - protein, 122 aa, Zea Mays
MMACRRLARDAVAASLRRSAATETTASTPAFFSSSSAAASSCSSGAPVAGSPIRHFLARYSSPAFQIQPSAAGLGPSFAARVALGLRPQLSGLNLIKGFGTSTMLAMTLHQGQVTAATKASS

SEQ ID NO: 70882 - protein, 213 aa, Zea Mays
MAGLCLLSSAPLPPRRGLGDGSVGMLQSLTVYYYLYQISTGLWMGIEFYAINTDSQALINSQAQYPLQIGEQLTHDLGTGGNPNLGEQAAEESRETIATALRDSDLVFITAGMGGGAAPIVAQISKEAGYLTVGVVTYPFNFEGRKRSLQVAYCEGGPRRSHVQDLPCDRWLGKIILETCISQIHIWLRYDSCVNATYIFPNYCRYFHLALRQ

SEQ ID NO: 70883 - protein, 582 aa, Zea Mays
MAANAAQQDPRGQRRLCGGGGGGATACVRPRAWCCSFSFSGVPDSPDLRPLPSSAASPPAGRKLPPKSPSAASFYGSPTSYRLAGLIDPRRILSPGRVSPIDHDGAVPPPLPLPPPPPPAAAAADDSAVVIPAERLASALPSATVAPSLVAVREEADAAGMLDLRLLLRGAHGRCVLMELDSSVLCGCSDFFAAMAPREDAAGAGGKRLEVDGVENLDAFCAAVELMYNPDPIGCLAAAGVSRAIDVLEVCSSIMFSKGIKSCLTYIEAVPWNENEEEKLKNLFARFTFDEAMSQDILARLRPHNWKSSDDLTIQLIQSVTGSTSTVARKDMQSLVNGLLSKSSVYQKDSSGLNKESLYQICYSCLESLVDLFEEAREPTDYTGQILVVRGSKPLIERVSRQTENLSWLLDILVNNDIAEEFVELWAKQDRLIRMHEQASAMVRYELSRISAAVFIALGKGKVQCRGNVRSLVFRGWFSTMLLDFGWLQRCPKGLDLRSLEENLGRGILTLPLRQQQCLFEEWFQFYSTKGAECPNLIRAFQVWWRRSFVRSSVEPQRRWNNCTDAMMTRRPAPLDPPMMAT

SEQ ID NO: 70884 - protein, 94 aa, Zea Mays
MCSSFISASPWRVSSFLISAALSIRASPCFASSWSALSGSQERKISTLLYMAVLDAVCGVESVVMDGFRPLVVFAIIVDRCRFERNHQMVWRRK

SEQ ID NO: 70885 - protein, 109 aa, Zea Mays
MSVKNFPPTKLASAEGSFVSSIENAASAWARIFTCSHRAFSKIAAIPLAPEKAQTSPRPLKTSSKASASLLIQSIGPSGSPSTKLSSHEYAPILAMLVFILCTHATDFS

SEQ ID NO: 70886 - protein, 577 aa, Zea Mays
MKYVLVTGGVVSGLGKGVTASSIGVVLKACGLRVTTIKIDPYLNTDAGTMSPFEHGEVFVLDDGGEVDLDLGNYERFLDIKLTRDNNITTGKIFQAVINKERRGDYLGKTVQVVPHITDEIQDWIERVAVVPVDGKEGPPDVCVIELGGTIGDIESMPFIEALGQFSYRVGPGNFCLVHVSLVPVLNVVGEQPLEEHVKAKLSQFCHVPDQKAHEAILKVLDLQYDGKVPREPELTKWTKRATKFDKLKTPVKIAMVGKYTGLSDSYLSVIKALLHASVAMERKLVVEWVPSCDLEDSSAKETPEAHKKAWKLLKGADGVLVPGGFGDRGVQGKILAAKYARENNVPYLGICLGMQIAVIEFARSVMKLRGANSTEFDPATTSPCVIFMPEGSKTQMGATMRLGSRRTYFHVSGCKSAKLYGNASSVDERHRHRYEVNPDMVPDFEKAGLQFVGKDESGKRMGIVELPSHKFFIGAQFHPEFKSRPGKPSPLFLGLIAAASGQLEPLLQRSNPTTKACSISKVPKLKLYPTGPVNNPLNSLVNGYYPNEKRRLRFSKPPAPATHGSDIFNEERLPVR

SEQ ID NO: 70887 - protein, 231 aa, Zea Mays
MDVVIEIRDARIPLSTSHPKMDSWLGNRKRIIVLNRKDMISTEDMNAWATYFGNQGIKVVFSNGQLGMGTMKLGRMAKSVASVANTKRKEKGLLPRPVRAGIVGYPNVGKSSLINRLLKRRMCPAAPRPGVTRELKWVRFGTDLELLDSPGILPMRISDQTSAIKLAICDDIGERSYDFADVAAILVQMLIRHPAVGSEAFRRRYKIDVDSECGKTYALTDPLFFIQKMLF

SEQ ID NO: 70888 - protein, 65 aa, Zea Mays
MGPNRFPRFVYPTPCLPLNFWVVLLLLYLVLGLMLHYDPVPSYAVVLIIVHDKIIVLIGTSEHGA

SEQ ID NO: 70889 - protein, 234 aa, Zea Mays
MQLMKCLPTLVGSRKNSGRRKEKGEGSSVDCGGRCGASAFIMLDAGLSFAYQLLYLLDATAFYSPALHVLGIHVCRATGQELMDSSSRISRIRSRELERLRGPPWFKAVQRVFLSCVYTTLDYAQTGLIAAVFFFKMMEWWYQSAEERMSAPTVYPPPPPPPTPKVAKDGIPLPPDRTLCPLCCQKRANPSVLSVSGFVFCYSCIFKSVSQHKRCPVTLMPAGVEQIRRLFHDL

SEQ ID NO: 70890 - protein, 80 aa, Zea Mays
MKILYSRSVARTREKKSKGMKIYYVAGPVPRGHGGTVLCGVAINFKLIDIDGSIEIVCCVVVRMHRKCNRMKQIMKKETS

SEQ ID NO: 70891 - protein, 665 aa, Zea Mays
MQPPGPPLATPQPLPPAVAAELAQLESRLGQVAGEPARHELAELGEVAAVRVLRRIARSQEQVRTLTGYIVSAAVQETFALNAQAVPTAESRACNSSAPSLSDGSVQGPQCASELRMEEVTAGLSNYRMAICEGQGQEDHAVMMAIDNPPDCIPPWGWDQDCIEVDNLVPGIASQANQMPMQYGDRDRIQELVSIVPHGVRMLAESLENGRASELQNYVQNGIPEQWMVPADQRMESTSSRLQHVLKCLQGVGPFGHHLGPECAIMIPKPEPNVVVENLFREIASPHITDNKLRNTASPQMCALEDLEFSKRFLILSYLCRNNLEDEVVLTVDYIKSLKFLSMVHFESQIWRKFGQKNFQASNRAATDRAKNFDSDPTTTKLYHCNIEIRGESIFFVLKGPYMENKRTYLQKVLGDDNVLLVKFMVSSDKSTDFYRQHYHRVVEDGIVLGLRRYNFFVYKDPGKETKKKDSEQGDIKKCTSPVRCYFICTKSGWRGDEAYIPIDKCRKLFMHIHTAPTIANYMKRFHLILSKTLTLDVDLSTIDVILIDDEPCRDEHGNIVMLDGKRLIHTDGTGFISENLAKKCPSRIIKGKKSKVYMHQGETTVRLFYNGYAVKGTLLVDKRISNNTIVIRPSMVKVKADPKLCRMKSLSSLEIVSTSCIWIC

SEQ ID NO: 70892 - protein, 439 aa, Zea Mays
MQTPTMSTSMATTAPAKPPAPPRQCCRYLLLPSTGHRRSVAAWSAKKKNPWLDPFDDGPDEEFDYQGMFSGGKQEEDPRPPEDPENPYGFLRFPQGYNPELDSLASKMLKDRYPGVLVDVVASARGKQVYEMCKNVRYANVYDPDDDWPEPAEYTHMLGVLKNRYYDLIISTRLAGIGHALFLFMSSARDKVGYVYPNVNSVGAGLFLNEMFKAPTNNLADGGYHMYKDMLEWIGRPAKNVPQQPTQPLRVSISKKLRAYVEDKYSRAGVEKGKYVVIHGIASDSVANMKSRGDDDCLLPLGHWAQIAKEISSGDRGLKPLFVIPHEKHRDEIEEEVGDDTSILFITTPGQLTCLINDSAGVVATNTAAVQLANARDKPCVALFSSAEKARLFLPYVEGKSSCTVISSATGNLIDIDLNAVKNVVKDLEPAPSFALAQK

SEQ ID NO: 70893 - protein, 525 aa, Zea Mays
MGQPGMDSVPGKENNGIAPNLNGVVSPAKQQLEGKEAMRYANILRSRNKFADAINLYTIVLEKDGTNVEALIGKGICLQAQNLPRQAIECFTEAVKIEPGNASALTHCGMIYKDEGHLVEAAEAYQKARMADPSYKPASEFLAIVLTDLGTSLKLAGNTEEGIQKYCEALEVDNHYAPAYYNLGVVYSEMMQFDMALSCYEKAALERPLYAEAYCNMGVIYKNRGDLDAAIICYERCLTISPNFEIAKNNMAIALTDLGTKVKIEGDINRGVAYYKKALYYNWHYADAMYNLGVAYGEMLNFEMAIVFYELALHFNPRCAEACNNLGVIYKDRDNLDKAVECYQMALSIKPLFAQSLNNLGVVYTVQGKMDSAASMIEKAIHANPTYAEAYNNLGVLYRDAGSITLAIHAYERCLQIDPDSRNAGQNRLLAMNYIDEGSDDKLYEAHREWGKRFMKLYPQYTSWDNSKVADRPLIIGYLSPDYFTHSVSYFIEAPLTHHDSTVCKVVVYSGVVKMPRHLDSRIRC

SEQ ID NO: 70894 - protein, 605 aa, Zea Mays
MTPEQRRENYSYDITYVTNSELGFDYLRDNLAMTVDELVLRNFNYCVIDEVDSILIDEARTPLIISGLAEKPSDRYYKAAKIAEAFERDIHYTVDEKQRNVLLTEEGYADAEEILDIDDLYDPREQWASYILNAIKAKELFLKDVNYIVRSKEVLIVDEFTGRVMAGRRWSDGLHQAIEAKEGVPIQNETITLASISYQNFFLQFPKLCGMTGTAATETQEFESIYKLKVTVVPTNKPMIRKDDSDVVFRATNGKWRAVLVEISRMNKVGRPVLVGTTSVEQSESLSKQLREAGIPHEVLNAKPENVEREAEIVAQSGRLGAVTIATNMAGRGTDIILGGNAEFMARLKLREILMPRVVNPIDGVIVSKKQMPPRKTWKTNESLFPCELSKETLSSVKDTVEMAVKEWGDKSLTELEAEERLSYSCEKGPTRDEVIANLRNAFVKIADEYKVYTEEEKQKVITVGGLHVVGTERHESRRIDNQLRGRSGRQGDPGSSRFFLSLEDNIFRIFGGDRIQGLMQAFRVEDLPIESKMLTRALDEAQRKVENYFFDIRKQLFEYDEVLNSQRDRVYAERRRALASDSLQSLIVEYAELTMDDILGVGYG

SEQ ID NO: 70895 - protein, 990 aa, Zea Mays
MRIAFLVLLVLSLFLLPNGIGKSLAARPSVVNIGSILRLNSTTGGVSDVAIRAAVEDINSDPTVLNGTTLHVQTRDTNCDDGFLGMVQALQFMETDVIAIIGPQCSPIAHIISYVANELQVPLMSFASDATLSSIQFPFFVRTMPSDLYQMAAVAAVIDYYQWKIVTAIYVDDDYGRNGIAALDDELTARRCKISFKIGFRSNAKKSDLLNLLVTVSNMESRVIILHTGSEPGLKLLSLANGLNMMGNGYVWIATDWLSAYLDANSSVSAETINGMQGVLTVRPHTPKSKVKSNLVSKWSSLSKKYNHSDLRTSAYGFYVYDSVWTVARALDAFFDDGGRISFTNDSRLRDETGGTLHLEAMSVFDMGNKLLNKIRNVNFTGVSGQVQFNAQFELIHPAYDIISIIGNGMRTIGFWSNYTRLLSTVLPEDLYSKPPNTSLANQQLYDVIWPGETAQRPRGWAFPSNAKELKIGVPNRFSFKDFVSKDNATGSMKGYCIDVFTQALALLPYPVTYRFIPFGNGTENPHYSQLVQMVADNVSVDMHFFPPHFIMYSSDKSKLILQDFDAAIGDIVITMSRTKAVDFTQPFIESGLVILSPIKKHITNSWAFLQPFTLGMWCVTGLSFLVVGVVIWILEHRINNDFRGSPRQQIITIVWFSFSTLFFAHRENTMSTLGRGVLLIWLFVVLIIQSSYTASLTSILTVQQLDTSIRGLDDLKNSDYPIGFQVGSFVEEYMIKELNISQSRLKALGSPEEYAENLKLGPKKGGVMAIVDERPYVELFLSTYCKIAVAGSDFTSGGWGFAFPRDSPLQIDLSTAILTLSENGELQRIHDKWLKTGDCSTDNAEFVDSNQLRLESFMGLFLICGAACVLALLIYLGITIRQYLRHEQPEKEREGWKWDIPFLVPFQASTCAFFMDNDDDDYEAAVVGAPFRTLHSSSTLPWLPPPCLPEPCTAARSPRLRRATLRRRPSPPAPSPGGEQPCGSSPPGS

SEQ ID NO: 70896 - protein, 112 aa, Zea Mays
MVWTCIAVAGRRGAGRGVGRRRGDEGTCRGGGGGRRPRERGGEGRGPPRERAETGRAGGIHARWRRASWARSAGVFHARTRGGGAQAEGETVWGEGREIRGTFHRRRDLPSA

SEQ ID NO: 70897 - protein, 403 aa, Zea Mays
MRGTRIKTRKRNIAAPLDPASFSDAIVQIYLDNGGDLELVAKSIESSDLNFSRYGDTFFEVVFVGGRTQPGTVKPEEGDRHPYSMLDCVAQRETILPFVLYIQKTLRRRPFLIKNLENVMRKFLQSLEFFEENERKKLAIFTALAFSQKLSGLPPETVFQPLLKDNLVAKGIVLSFITEFFKEYLKENTLDDLIALLKKGKMEDNLLDFFPSAKRSSEALSEHFIKEGLTSLVEYNEKKMFEVKLKEIKSTLTTMINDEAAIPEVIETVKQQVKDAKFPDLEVIRMLWDVLMEAVQWSGKNQQQNSNAALRQVKAWAELLNAFCTSGRLELELIYKVQTQCYEDAKLMKLFPEIIRTLYDQDVLAEDTVLLWFRKGSNQKGRQSFVKALEPFVKWLEEAEEEE

SEQ ID NO: 70898 - protein, 125 aa, Zea Mays
MSVLNVSDNKLKELPESIGGCSSLEEFQANGNAIEDVPASICNLVCLKSLSLNGNKIRQLPQNLLKDCTALQSLSLHDNPITMDQFQQMDGFGEFEARRRKKFDKQIDSGVMMGSTALDEGVDFH

SEQ ID NO: 70899 - protein, 54 aa, Zea Mays
MMARLGCTTKVMRMLTASLLLMTTAVHGGAWSACRWRGCATPPRNDRARVGTRR

SEQ ID NO: 70900 - protein, 332 aa, Zea Mays
MAAVDTFLFTSESVNEGHPDKLCDQVSDAVLDACLAEDPDSKVACETCTKTNMVMVFGEITTKANVDYEKIVRETCRNIGFVSNDVGLDADHCKVLVNIEQQSPDIAQGVHGHFTKRPEEIGAGDQGHMFGYATDETPELMPLSHVLATKLGARLTEVRKNGTCPWLRPDGKTQVTVEYRNEGGAMVPIRVHTVLISTQHDETVTNDEIAADLKEHVIKPVIPEQYLDEKTIFHLNPSGRFVIGGPHGDAGLTGRKIIIDTYGGWGAHGGGAFSGKDPTKVDRSGAYVARQAAKSIVASGLARRAIVQVSYAIGVPEPLSVFVDTTSISGLA

SEQ ID NO: 70901 - protein, 86 aa, Zea Mays
MLQYNINKVKWERYVKCLVIIKSLIKYPIKSVIPECEIAKKYLKKIASHFTRSSKAYARSLMMEFLNVTYDGSGVKLFIQNMICIV

SEQ ID NO: 70902 - protein, 69 aa, Zea Mays
MRSATLLTICTLSALLLVARGSEKPSAAPPPVVAVGVAAASDLIRSGGHRYLDVSITFALESSLRPSSN

SEQ ID NO: 70903 - protein, 428 aa, Zea Mays
MKSDWHSCLGNKVGFKGFGVPKEQHDKFVKFTFHGQPAEIRHGSIVIAAITSCTNTSNPSVMLGAGLVAKKACELGLEVNPWIKTSLAPGSGAVTKYLLKSGLQKYLDHLGFNLIGYGCTTCIGNSGELDEDVAKAVTDNDIIAAAVLSGNRNFEGRIHALVRANYLASPPLVVAYALAGTVYIDFETEPIGKGKDGTDVYFKDIWPSNEEIAEVEQSSVLPDMFRSTYEAITQGNPMWNQLSVPKADRFPWDPSSTYIHDPPFFKDITPTPPGPCSIENAYCLLKFGDSITTDHISPAGSIPRDSPAGKYLLERGVQPKDFNSYGSRRGNDEVMARGTFANIRIVNRLLNGEVGPKTIHVPTNEKLFVFDAAMRYKADGHHTIVLAGEEYGSGSSRDWAAKGPMLLVYAYHTAVVFFACYQKFARIF

SEQ ID NO: 70904 - protein, 58 aa, Zea Mays
MVPPCGRSHMWAGHLVASSAGQEQVQHDEKHEGCHDGFVRGLGRHLPVNFGCWIVVFV

SEQ ID NO: 70905 - protein, 993 aa, Zea Mays
MSMAWRLLRTIHFRHLSPGVRRASKIVDQGFTNNAPELSTNKGSLLRCSSIRFGEKRNSIFACAPDNLEQKSGQTFEADAHSALKLCSGIGSVVIAKCSHIFERNGDTFDGNCSLQDILKPGLWLSPETLRRFWRVSELKPKDFLDILNGFGLSAVKVRNARFLWNLYRWTSRQSKEFQHLPRSNETMVSILADAHMLSQAESLLLSLIDHMTPAVSSELFSQIIQVYSEAGNLGKSVALYDYARGKHLIPSASCYQVLLHFLTRNRKDELILRVYLDMLEVGFGSCTEGNILDSVVMALIRKGKLLEALGILRQLKSLGLKLSKGALSNIVEEFNKKKDIGDLMNFLEDWRCIPELRLCNRILASLCTNLGTCQAWLVFQSLEALGFAPDATTFGIFIFHSCREMKLKSALVYLSECFARHVKPGVCAYNAILGGVFREGLYRHAKYIFEDMIEREVTPNLSTYKIILAGYCRYRRFDDIEQVLRHMKTNGVNVLLSGNCVLSKALSFLGLDHLGVKIKRDNVTGFPKAEFFDSVGNGLYLDTDSKMFEVSLSQVLDSALLPDINSELIRASQQGDVASALLVKDKAFQWGYDISPDSCSELFKALCVSPAYVIDVIDLMEEMPDILYKLDAQNLDLVAQTLSRNGMSAHAKLVLEKMLREDLSISHNTYTYLMIGLCEERNIAGFWECWNLATKCRWSPDSKDMMGLISYLCKWGVIEEALKLMNSLFDCYHDLFFSAYCALLKELCRTGHTSIGCAMLEALKEKGVAVDRSLFFYVMEGFLKEQRTAESIGMHDMWLSKSKELDVFTYRSVLPSLPWLDTDRAKNLVESMLTVKLTEFSYRGCIVNELMQTRNIKWAIPVLQESAPGKLSATLLNSLLQAYGWLKNWRKLDAVLCKMLKMHATLSISSYRFLVCRMCEQSRFSSASSLRALFQHTDKSRELIACNILIFYLFQRRNSSQIHDLLKDIEGNKTKQPQSQNSVKSLLQARKP

SEQ ID NO: 70906 - protein, 1200 aa, Zea Mays
MYIKKVVIEGFKSYKEEISTEPFSPKVNVVVGANGSGKSNFFHAIRFVLSDMFQNLRSEDRGALLHEGAGHSVVSAFVEIVFDNSDNRIPVDKEEVRLRRTIASKKDEYYLDGKHVSKTEVMNLLESAGFSRSNPYYVVQQGKIASLTLMKDSERLDLLKEIGGTRVYEDRRKESLKIMTETANKRKQIDQVVHYLEERLRELDEEKEELKKYQQLDKQRRSLEYTILDHELNDARNELASMDDNRRKISESMSLADNEVVDVREMIKSFDKEIKVSTKGINDTKAQKEGVEKRRTEALKVVAKIELDLRDIKDRIVNEKRAKDEAARDLQSVRRESEKSKSELAEISKVHQAKLKEEEDISKSIMDREKRLSILYQKQGRATQFANKAARDKWLQKEIEDLKPVLLSNKKQEGLLQEEIQKLKDEINDLTNYIESRKSESSKLEETLAKRHNDYNDLRKQRDVLQEERKSYWKEESEVTAELDRLQEDLIKAQKSLDQATPGDIRRGLNSVSRIIKDHGITGVFGPVLELVDCEEKFFTAVEVTAANSLFHVVVENDDISTKIIQILTREKGGRVTFIPLNRVKVPDLSCPQSPDFVPLLKKLKYRSDHRRAFEQVFGRTVICRDLETATKVARSNGLDCITLDGDQVGKKGAMTGGFYDSRRSKLKFVKIIRDNKTAIDRKTGHLESVVNKLKDIDKKITDLVTKQQQMDAERDHAKSELEQFKADIARAMKQRGSLEKALVKKEKSLNNICNQIEQVQSSIAMKNDEMGTELIDQLTSEERDLLSRLNPEITDLKERFLMCKNSRIEIEARKEELETNLSTNLIRRQKELEAIISSADSRTLPLEAEAKEQELKSSKRNLDELTSLLKANVDAINNFTRKMDDLKRKRDDLKAREAILEQTVQDGAKDLEQLMNSRNTYLAKQEECTKKIRDLGLLPADAFEAYKRKNKKQLHKILYDCNEQLKQFSHVNQKALDQYVNFTEQREQLQRRRAELDAGDVKIMELISVLDQRKDESIERTFKGVARHFREVFSELVQGGHGYLVMMKKKDGDAVDDDEEEDGPRDPGPDGRIEKYIGVKVKVSFTGKGETQSMKQLSGGQKTVVALTLIFAIQRCDPAPFYLFDEIDAALDPQYRTAVGNMIRRLADMADTQFIATTFRPEIAKVADKIYAVRHKNRVSNIDVVSKEEALDFIERDQT

SEQ ID NO: 70907 - protein, 394 aa, Zea Mays
MPDKAVDDVMEAAVGAHFSGLRLEALRLSTSAPSSPSSSPAAAAHTHSNGAVYANGTTELPSPAAARQPFVIGVSGGTASGKTTVCDMIIQQLHDHRVVLVNQDSFYRGLTAEESAHAQDYNFDHPDAFDTEQLLECMGQLKCAQPVNVPIYDFKKHRRCSESFRKVNASDVIILEGILVFHDQRVRNLMDMKIFVDTDADIRLARRIRRDTVERGRDISSVLDQYGRFVKPAFDDFVLPSKKYADVIIPRGGDNHVAVDLIVQHIRTKLGQHDLCKIYPNVHVVQSTFQIRGMHTLIRDRDITTPDFVFYSDRLIRLVVEHGLGHLPFTEKQVITPTGSVYMGVDFCKKLCGVSIVRSGESMENALRACCKGIKIGKILIHRVGDNGQQREYA

SEQ ID NO: 70908 - protein, 460 aa, Zea Mays
MDSDDEEMCDAASSAPSSPAAGGGVGEGEEEEGGVDDGRRGSEGVVIMEVTWFQVDLDYEFDAPRWFDLAQEEAPLDAAAAQEWFTSAPSYPPSPLIAKMLAEDLGLQTIRSIADTDDLHCSTASHECSSGMGPKIRQLEVKIGRKACNGASENERRSHYQTTMKGNSLRGSTLMKPTASQLAKQNRPAQLKNLTQNKKSVGVIRERSTISSNDCNYQSTKRQRLENGHLNKAAATAIQHEFIHKNHEKNVMNQNMDQPTVLPRLKITIPRSPDLATKLRAERSKAQRAVPTLPKQLNDLIQRVAPSAPTVQVAPTRKQVVQPFWATGHQHASRQHEDVGSNVAACTSNHARHLKSVDNKTEDTRHGLFKFKARPLDRKMLENKGDGVFRCAKRNTTVPKEFNLSTGRKANPAPLSELFNKLSLTAGAHQNRGVGRQIRDLPNYITTKDCKENMIGNMHR

SEQ ID NO: 70909 - protein, 738 aa, Zea Mays
MASRGGSSGFIEYFHNSTKRHGSNRENTSQQGMNAIRVQKEMKKEWARPGRVFNRNITRGGYSRSSLPGVTQEFRVVKDNRIKLKEVSETLPEASQNGDSSNECAFSNVRDKCSTKKLAAQHHLVTCNVNGHGAAHADNGIKIAAQAHDKEVKPSIVRKMEQYEGTQASLVGSHAVLGKGNQNTVDTAASGKNNFGGELCCSSSDPIHVPSPGSKSAGTFGAIKREVGVVGARQRPADSAAIYTSTSNGLVKVVSAPKVSPHLEWKPKSVSPSTAAPPGAPSPVDDGSKTEVSALSKKLSHANVSHEHVIIPEHIRIPDSERTHFIFGSFESEIYPKASLAAYYDAVAKEDLNDHSPSSVAALGFTSTDGTLNDRMDNVGSCSPLPQSEPAVSVSEHEQSLTECVDVRSPGVVGGTNETISSKVTHSQPRLQHQEAAQNFKAYEPDSGYGMSFITKVDGEAAQGIAYSSEAMVLHSVNGYQLPASTATQQPVPQMFSQQFQAPQYPNFLPYRHVFSPQFGSLMVVPNYSSNHAFPQLPHASSYLVMPNGASQLAANGMKYGSNHQYKQVFQGAPAGYGYGNHNGYPNGVIGGTGAIEDMNMSKYKDNCLYAPNPQVETADVWIQSQKESPNMPSAPFYNMVGQPVSPHAAYLPPQSGHTAFSPAPSHPGHLQYPGFVHALQPTSMTMVQNPQTMIHQPAAPPLAGNLGLDMSAMVPGNQVGAFQHNQLAHLGWTTQSF

SEQ ID NO: 70910 - protein, 588 aa, Zea Mays
MEPFSLKSCLLPHSIKDQNTGSWTRFVNDCGTELIRLQIREHKAKNSMAVVRELVGVLKSTKKQIQLAEFKENKWTLKDSNLPISHGTDGSLLDLKGDNHLIKLYRGRKLEYERKCCSAHSEDVSAVTAVKFCAEHPYGKAVALLDTEAQLIMVNEDWLLLPWISISVLFMDGDGGTKLGGGAMVQKGTVFGSDTSMVLETQTVGAGSVASNLAQCGTCSAVFGGDDKEMANCKVEHASSGASRTVVASGENGHTETAGCGGGCGSNCGPMMAEDPKAGNAKSGGCGSGCGGGCGGAGGCGTMANEGQSRSGGVGTLLSSNAMGGEGQQAHSAGCGSGCGGGCGSGMVIEGSKVNNVNAMSGGCGSGCGGGCGSGMLIEGSKANKAMSGGCGSGCGGGCGSGMVIECSKANNTMSGGCGSGCGGGCGSGMVIEGSKANNAMSGGCGSGCGGGCGSGMVNEGSKAANTMSGGCGSGCGGGCGALFNASTAAGEGLHNKSAGCGGGGCGSGCGGGGGCGSGMAIEGFKANHAKSGGCGSGCGGGCGTGSMVAEGSNGGNAKSGGCGGGCGGGGGCGGGGCGGGCGAVFNA

SEQ ID NO: 70911 - protein, 1242 aa, Zea Mays
MARRPPPSPPPPAQGNGSGSGSLTTRDALAYLKAVKDKFQEKRHTYEQFIQVMRDFKSDRLDSTGVIARVKTIFHGYPDLILGFNAFLPKEHAIRPLDLREDKKPVDYPRAISLVNRIKSRFQQEEHVYKSFLGILNKYRMHNKPIQDVYNEVTALLHGHPDLLEEFSHFLPDTPMPPPQAGTTTKVRHDDNNAIMHSVTRAQTVQRGRDFPSTADWDTSADRLDLEHDIQKSCIEKEKIRDACPRQHRRGYKRNEKNDEYENEDLDVEQCGHKSQRKMEGTGDDTPGDATLSSFNCSHAQEFQFCEKLKAHLEPEAYQEFLKCLHIYNQDIITRNELKRLVKDILQHYPDLVNGFNDFLGHCENIDGFLEGTFNKRQTSRMVRPVEKERYKENEGDSDPEKERYKESKNSERVLTFNSKEGAAHEASTFPSKEKYNLCKPISELDLSNCQRCTPSYRLLPKNYPVPSASNRTDTEASVLNDRWVSVTSGSEDYSFKHMRKNQYEESLFRCEDDMFELDMLLESVTVAIERVEKLVERMEGNSLKPDSSISLDEHLTSLNMRCIERLYGDHGLDVIDVLRKNVGVTLPVILTRLKQKQEEWSRCQSDFNKVWAEVYSKNYHKSLDHRSFYFKQQDTKNLNTKALLSQIKEISEKNRKGDDVLLAIAAGNRWPLVANMSFVYLDMDIHEDLYQIIKYSCGELCNSSDQVNKVMRIWTTFLEPLLGIHHRAHGAEDADMVKSKRRTREVGLACGGKTNNAAAKGGNGSKSAGAESVAEFMGRNETIPSMKSIKHDRITSLYGVGVHPFSAYSVSHNNLRPETEEGELSPNGDFKEEHFCVFEDEAVDGTSKQNEGSTSRSPQGRPKNYLKFSGKDHSGAENEGNKRAQRSAEDSENASEADEDISGSESAGDEESSHEDQEEEEDDMDLDTKAKNDCRAEVNREAQGLDGGTSLSFSECLQSTVKPISKYVSTALPNHEKKLSHIFYGNDSFYVLFRLHQIFYERILSAKTNCSTSDNNWKASRHINSPDQYSRFISALYNLLDGSSDHTKFEDDCRSIIGTQSYVLFTIDKLIYKIVKQLQALASDEMDNQLLQLYLYEKSRSPGSFFDLVYHENARALLHDDNIYRFECHSDPTELTIQLMEYGNEKPELTAVSFDPTFSPYLYNGYLSSIDDTKLVDDVFLRRNKRKQGRNDDSPTSLKIMDNVMFANGLECKISCESSKVSYVLDTEDVLFRTRKRRSSI

SEQ ID NO: 70912 - protein, 870 aa, Zea Mays
MAAKMAGAVQVLKDDTVKRTPMARPSNGREGKPIRLLSNHFSVKLRGVDAVFYQYSVCIKSEDDKVVDSKGIGRKVIDKLLQTYCSELDGKDFAYDGEKCLFTVGPLPQNNFEFTVILEETSSRAAGGSPVHESPTQANKKRVKRSHLAKKFSVDISYAAKIPLQSVALALRGSESEHGQDVLRVLDVVLRQQQAKRGCLLVRQSFFSDDSRNLVDLTGGVSGCRGLHSSFRTTIGGLSLNMDVSTTMVVTPGPVIDFLVTNQNAKKMLKNLRVKAKHNNMEFKIIGLSDQPCSRQMFPMKVRNGNIEIKSVDITVQDYFKSKQVELTMPYLPCLDVGKPKRPNYLPIELCHMVSLQRYTKALSSQQRAMLVEKSRQKPQERMRVVTDAVKSNMYDDDPILSSCGIEIEKQLTRVDARVLSAPALVVGNSEDCIPNRGRWNYNNKRLFDPVKIERWAIVNFSARCDMSRISRELINCGRSKGIFIECPHSLVDEDSQSRRCSPVERVEKMFEKVKASLPGPPEFLLCLLPERKNCDIYGPWKKKNLHEMGIVTQCIAPSNKMNDQYFTNVLLKINAKLGGMNSKLALEHRQMIPVVTQIPTLILGMDVSHGSPGRADIPSIAAVVGSRCWPLISRYRASVRTQSPKVEMIDSLFKPLDDGKDDGIMRELLLDFYQTSQQRKPKQIIIFRDGVSESQFSQVLNVELNQIIKAYQSMGQGDLPKFTVIIAQKNHHTKLFQADSPENVPPGTVVDSGIVHPRQYDFYMCAHAGPIGTSRPTHYHVLLDEIGFSADNLQKLVLSLSYVYQRSTTAISVVAPICYAHLAAAQMGQFMKFEEFADTSSGSVNSSSPPSIPELPRLHADVCSSMFFC

SEQ ID NO: 70913 - protein, 921 aa, Zea Mays
MVESDSKSRREYEYGAISPLAATYDLPSIAMSSNQNESGGGGGAGPPLPTAFKSPSTDGKSGSRRSTRFKDEDEYVEVTLDVRDGGGGGDDVAVLAIKDDVRDDTQDAASLLDRPAPGGAGGGLSSKLRAARARLGRIASGKRAAVPLSALLRRDPDRARLDRSVVTALRGLQFLNQAAVTEGWPEVEKRFHRLAVDGFLLRSRFGQCIGMVGSEEFAAQIFDALARRRGITAMVLTKDQVREFWEQLSDPGFDAKLQTFFDMVDKNADGQITEEELKEVLTLTASANKLSKILERVDEYTALIMEELDPDSLGYIEIANLESLLLQPPSQAPTRLVTHSSNISQLISQRLAPARDDGPLRRGARAVLYFAEDNWKRVWVMALWLAINAGLFTWKFLAYRRHPTFDVMGYCVCVAKGGAETTKFNMALILLPVCRNTITWLRSRTRLGAAVPFNDNINFHKVVAGGVAVGVALHAVTHLTCDFPRLLHASAAAYEPMKAYFGQRRIPNYWWFVRGVEGITGVIMVVLMAVAYTLAHPWFRRGKLSEGNPLRRLSGFNMFWYSHHLFVIVYVAFVVHGVCLYINRTWYKQTTWMYLAIPILLYAGERLLRALRSHGLTTVRIEKVALYPGNVIAIHMSKPHGFSYKSGQYIYVNCGEVSPFEWHPFTITSAPGDDYLSMHIRCRGDWTASFRALFAQVCRPPAAGQSGLLRADFASSTAAGGGGKLPKLLIDGPYGAPAQDYRKYDVLLLIGLGIGATPLISIVKDVLNNISDNKDEEQPAEFMTRRVYFYWCTREEGSFEWFRGVMNEVAERDARGDVVELHNHCTSVYEEGDARSALLVMLQALHHAKSGVDVVSGTRVRTHFARPNWRDVFKRVACNHQGQRVGVFYCGDQKVTPELRRLSQDFSHKTTTKFVFHKENF

SEQ ID NO: 70914 - protein, 221 aa, Zea Mays
MSGRKSTRGRAGVGRAMEGSSTSWGAAMGTGGKRWSSSRTPGRRPSRAPRRKSRARRFWLPRQLLSSVPTGGSTGCWARTGRNPRTGAQGKRNRSAERKGGQARGSGAMERSLGVAARSREARHIGRWDERLITSGWMSGGTTRRRGSTMGAREGEYELQEGDGNGYRGGVAGHRFQQKSTARKKSWRRHRSSSRCLSGGEKKIRGGRRDGDRKETAGRLR

SEQ ID NO: 70915 - protein, 678 aa, Zea Mays
MFKSMVYYVNTSIGEVEVWPKGEASAGLTMAAWAREIRVERISPPSERCPPLAVMHTVAVGARCLVMESRPPVVADVVPPLVVMHTACLRENKTAVVPLGDEELHLVAMTSRRNLTNHACFWGYKLPFGLYNSCLTMLNLRCLGIVFDLDETLIVANTSRSFEDRIDALQRKLSNETDPQRRNGMLSEIKRYQDDKSILKQYIEGDQVYDDGKVYKAQPEIVPPLSDNQQPMTRPVIRLQDKNIILTRINPLIRDTSVLVCLRPAWEDLRSYLIARGRKRFEVYVCTMAERDYALEMWRLLDPDSRLINSVQLHDRMVCVKSGLKKSLLNVFHDGSCHPGMALVIDDRLKVWDEKDQLRVHVVPAFTPYYAPQAEANCSIPVLCVARNVACNVRGGFFKDFDEGLLPRISNVHYEDEVNEISAPDVGNYLITDDENVALVNGNRDSLPFDGMADAEVERRMKEANAQSFHQTAGDFVMPVAPAQNFVSTSVASLAPPLGMMPSPFSQPVAPPGFSDSLQGSPAREEGEVPESELDPDTRRRLLILQHGQDTRDPTSPLPAIPPVQVPVPPVQPHGNWFPTEDGINQSNLNRGSAGFTVESDSIVYEKKQPPHPSFFHGGDSPMPSDRFGYQNQRFPSQLPHEDHPMMQNHAPPKYRSFSAYWSFWLRRIFLHKPVRYW

SEQ ID NO: 70916 - protein, 289 aa, Zea Mays
MHQEGLNESLIQDCEQIVLSEFSSYRKQLKCRYEDYLSLFGSCRHNFEEGKDGSITQGTLTRNDFSSSRHGNFSEYSTTESDEHEFEKHDGGELICEDESAFFDSIDYFTESDNRSSTMLSGKEVVDSQTHDSSNNIQAQIRRRSRLPDPIEKEKGISLWSIIKDSVGKDLTRVCLPVYFNEPLSSLQKCFEDLEYSYLLDQAYQHGKVGDSLMRILKVAAFAASGYASSVARPCKPFNPLLGETYEADYPDRGIRFFAEKARAGNSGATAISNPSFGDSQFKLNQLAF

SEQ ID NO: 70917 - protein, 1162 aa, Zea Mays
MRLRNTDRAPRSSGRRNNVLSWISEVKDTSNVGVRKKRGRRAPPSAKRLRDKRVDKAIESDGAVDSDSDDTDGQVDKNQPSAHIEEHVDGRTGDDLATAGHSGNSSNGPSSASEEQDHSTNSKDKLQKASSQNTKKVFGNSTNGKQGASNLEQECANEDGSHVLVAAVYKDIDNERSSQKIRDDVSDAQLDTASSDDKSSEEVEDVCDICGDVGEEEKLAVCSRCNDGAEHTYCMRVMMEEVPDSEWLCEDCQTAVESENENRLQKSQVKAGTSKELSLEGEINKPAIAAKGRSSSDCELKAGNIENKESNTTNERNGTVKTRTEEDAVTTSSTRDIFSETGGLYMGADSRKRMEPSHETFVSDADKGKQPSHQVSTSLVVNALKNQAPQSRGQLSKSTSFNNSKVPKVKQLLNEVPQKPKFLKESWSSIINKKEGPISMTTKSATFKKPKPCEPTNKAKSSVLSPVEEPRVPNQLASHNVTNGQCSILGPPSATSSMVAPVLRTDSTTQLLSTRNNTVDSNNLGSVHLQGNSELKKPRLAKVPGSMMLSNAERSAGGILGSGAHREVIQNSDPSHRDAKIKDQTGFRQGASSSNRTIRCQRCNEYGHSTHFCEVEKLRLSSGKPLSERNLKDASAKRNKTSEVSTLASSEKTPSREPEHVVKCAINQNLINGPNDGIPAPFSHVKKHSLSPRANVSIPGSGVDCSKPKFKNNDPSLSGTAGIFVHNGRIMPNDHRDEPAQGFSAGDEPTSSTVPELGWIWQGGFELQRTGSSPELCDGFQAHLSCSASQLVLDAVKKFPSKVQLEEVPRKNSWPTQFQKNGPTYDNIGLFFFARDVQSYENHYSKLVENMLKNDLVLRGSVGTVELLIFPSNILSKNFQRWNMLYFLWGLFRVSKKDSSNLPSYLSTSRVERNFNDDLQAMDWMPSTHSFSQNRSDLAEPDPDLLKSTNFEPSLEASREVCLDGENSLNQLVRRRALDDHLDSDAKACSTISNGAMGSSAMSMQRKHQKPDYPEHQDKKRDTFGGNVSERDFDVNTVPVTCSVSLTHLQEEPGKLSTAIDLMDIDHGVSAGALDRSHASGGAGKRSFETAEVAAEVPEHKKTKLDNNVVPISSGPRENACTNDGNSDKLMPGSSSSDGKRVFPLDLNAVGDEDIVNIPAFR

SEQ ID NO: 70918 - protein, 59 aa, Zea Mays
MTSSSSSSPPSSRRPTAFARPTKNKTDGPKPDSGYVSVARPRTSATSTAEKPMDRSRHA

SEQ ID NO: 70919 - protein, 259 aa, Zea Mays
MSAAVRSRAAAAALSAARRIHAGHAAGQKQQGSNSTGAFRRPWTLFRRQQQEERSHVPRAAAPVLDAVADHRAGGSDGAEPPEIWRQPGEAPVAPEGVGAVGRIDVVRVAAPGGEDFDGKDGGGESGGWGGSNLGRRFPTPKEICRGLDKFVIGQQRAKKVLSVAVYNHYKRIYCESLINRSAADCSQSDSCTSDTDMVELEKSNILVMGPTGSGKTLLAKTLARFVNVPFVIADATSLTQAGYVGEDVESILYKLLGC

SEQ ID NO: 70920 - protein, 92 aa, Zea Mays
MTDRDHVPPHLAPLAPRWPPSPTAHRGTRRAWTGSPAPPDPTGPAPARRGEAARWAPERERERAPSEEEQDNAAAGPRRRSACLRTARKNIA

SEQ ID NO: 70921 - protein, 598 aa, Zea Mays
MGAAPVLVLLLLVAAAALPRRASAATDAGDVSAINGLYVALGSPKLPGWSASGGDPCGESWQGVTCTGSSITSIIFNAANLGGQLGSLGNFTSITEINLSNNNIGGSIPEDLPVTLQNIFLSDNQLTGSIPVSLSKLHSLTAMSLNDNHLDGKLPDTFDSLTELVNLGPLPPSLGSLTSLTTLHMQDNQLSGTLDVLQDLSLKDLNVENNMFSGPVPPKLLNIPNFKNDGNPFNTSIAPSTSPSSPTGSPTQTPSSSSSPSGSPSPSNAASNSSSGSTARNSNSTSSKKKKPSTLRTVGYVLLAIVLFIVLALLVVFCLSKYQERQTRRDYSMAQLGRHQRAEEPKSKQASVQSRHDAKKGLSEVPERKKPREINLAVPVAIEKPPEKRKEHVINLERTESEIFAAAPPPPPPPPPPPPPPPPPPSTPPPPSPPPRLPSPPPAEKVTVNPIVRPVKRVNTPPRTGPSTSATSFSVASLQQYTNSFQEQNLIRESRLGKVYLAELPEGKLLEVMKIDNANGRIPVDDFLELVACISDIRHPNILELVGYCAEYEQRLLVYNHFSRKTLLDVLHEGEDIDNPLSWNARLQIALHAAKALE

SEQ ID NO: 70922 - protein, 293 aa, Zea Mays
MSDPRGHAAGPDRDGDDPLAEDANSEEAWQTPEKEPVAVSKEAAARGGDTTPDAEPESDDGEGGVGSPDQMEPNADGERAPPVAAAEDPEGIVGSAKVETNGEDAISLDADGEEEDDDDDGDEEEEEEDDDDDDSTPDASPRAEVKVEGESSTGMTQSGAGHRVEVEPDPFLDGDDSGTEEEQGAFMAELERFHREHSLEFKPPKFYGKGLNCLKLWRQVAHLGGHEQVTVCKLWRQVGETFRPPKTCTTVSWSFRIFYEKALLEYEKHKVRTGQLQIPPPGLPQPSGADRES

SEQ ID NO: 70923 - protein, 119 aa, Zea Mays
MNVGDLWDNEFKLLNLIALLSYMLHVHSHLRPLMARIGVSGHDNLGGLSHPLAAAPGAHAVPKSALRLVPSTPWTNPGEEPLCPARRPSLYLTWPRFPRPSSSSLRARPTSGPARGAWP

SEQ ID NO: 70924 - protein, 61 aa, Zea Mays
MYLSISLTMMIKEILMMMTLNLMSSHNPWQLSYLEELETQPLLQRRRETPTWLQELGSARE

SEQ ID NO: 70925 - protein, 96 aa, Zea Mays
MAASPPSPSLPVWCPADALSHGRPPPLAASQQPHLLCPPSPARPSTMDTASPGTRPLHAIALLPAASPISTGALIFSHPAWPASSPFSTGELISYC

SEQ ID NO: 70926 - protein, 665 aa, Zea Mays
MGVVLLGFLGQLIERRASLRWKQAGRASYRCTGMSTHIIQLLQGLCSDGLWRYGVFWSFKSETNGWILTWGDGYVNKMIEDWQMGDLSASPTVRKNQTIPSSWCKKSYPFCPIEAALMRMPSHLYPLGEGIIGKVALTGQHCWISANELCSTAMHKYQEDWQLQFAAGIKTVLLVPVVPHGVLQLGSLDTVFESAVLVALIKDMFHKICDASVSHASLSTGSAYSNNLSLPTATLSINHPDVNLIYSSAQIVNADHHSLTHPFSTSEIPILEDITIGSYRTIPTGWPNGLLGDNGTIGHEYFEGFSLTDMAHWNQENTHGSTIVVNDGAMLSNTSIHSEFHGDVMVMSREEHELFTWRCRLKQEPTSPALPQLNDNSADLYVQLETNNYAELLLDTIIYQTGHTSNIESAPSAESPISCKTQVKKDHSLRVDESPISDIPGRQDLSPISINEGFISCAMTDGRVEINKTIPEECLVENTHRINSAEIKRRCRKVELQRPRPRDRQLIQDRMKGLRELIPNASKCSIDALLDKTIAYMLFLQSVSEKAEKRRCPMPYFCFAVTLRQIQNTLEDKESHDETKKQLERCPLRVEELNQPGHLLIEMLCEDYEVFLEMAHVLKGLKVSILKGVLEYRSDKFCARFVIEGSDGFNQMQILCPLMHLLRRR

SEQ ID NO: 70927 - protein, 887 aa, Zea Mays
MDAKINDQQWKYSVIQEFPDIDLLQPSSSAASTFASSQSHLKAITASKRMRSAPNQVWMNIPINTFQPRARPLFQYRYYSEQQPLRLNPAEISEVIAEVCSEATSNANQLIVPSRLSTQSRQPSADVAFSVLIKLVIDMYMMDSETAAPLTLYMLEGMLSSQKSSARTKALDLILNLGVHAHLLQPMVIGDAPLIDKSESVNRSYLSNEYGSSINEPREAEPEVEQKISPAIDQFESWLLKMLFEVLLLLVQIEERQEIVWASALSCLFYFVCDGGKIIRSRLGGLDIRVVKTLLEISVEHSWAKVVHSKLICMLSNMMYQVSDLTQNGVSDTHFVPERIDLLGGIDYICLEYSRANSREEKRDLFFVIFDYVVHQINEACLAGGISTYTYDDAQPLASLLAFADAPEAFYISVKHGVEGVGDMLRKAISAALSQSAQYDQLNVLLDKVMRKLDGTASTFSRIDNEFSYMIQVTKSCKCFGSIKDGCDDADVALRARLCWATLHSLLHSHISSYRHHGYIWLVELLLSEISEETDGSVWSKIQKLQEEIEVAGSQDLSCSEVSLPVCMLCGLLKSKHNFIRWGFLYVLDKFLMRCKLLLDDNDMQDHTTADHNKNCLDKAFAVIDIMNSALLLVVQNNETDHINILKMCDMLFSQLCLRIPSTNAMQVRGLQSLGQLFGYTSKNIDSHLETLASHQSIGNKNICRSETLQDIGIDQSGQSTSFCEASMAALLLRGLAIAPMQLVARVPTSLFFWPLIQLEGAASDDIALGIAVGSTGRGNLPGATSDIRAALLLLLIGKCTADQEALKEVEGNEFFRGLLDDTDSRVAYYSAAFLLKRMMTEEPEIYQRMLQSLISKAQQCNNEKLLENPYLQMRGILQLSNDLGVQ

SEQ ID NO: 70928 - protein, 147 aa, Zea Mays
MVDPAAVFGMLFGSDYFEDYVGQLALASIASVEVEENSNSQEARAKVQEKIKELQREREQKLTQSLKDRLQSYVDGRNDEFVSYASAEARRLSEAAFGEAMLHTIGYIYVRQAARELGKSRIYMGVPFIAEWVRDKGHHIKSQVLFL

SEQ ID NO: 70929 - protein, 417 aa, Zea Mays
MASDNLSRSTSVRACLVSLANREYDSAPAEAFFFLYCATVRAAAFAKGNAASLPAQHQHGPAGIVFLAAASNWTMMASRQSENNAQEETSPLTTPNANIARIIPSLPLETRWPPFPLRRYANFWLPEVALKEGVPGVHSCFEPRPTDVFLASFPKSGTTWLKALAFATLKRSTHPPFDDDHPLRHCNPHDCVRFLELDFNQQKDELEALPSPRVLATHLPYSLLPGSITGDGERSGCRIVYVCREPKDVLVSSWLFTRKAAPACGVDARSFTIQEALELFCDGRCLGGPQWNHVLHYWKESVRRPDRVLFLRYEEVLIEPEAHVRKLANFMGCGFSEEEEERGVVSAIVELCSLGKLRDMEVNRNGSTLLGIKNESFFRKGVVGDWSKHMTQEMAQRLDKVVEDALQGTGFTFASTA

SEQ ID NO: 70930 - protein, 304 aa, Zea Mays
MAMAPSSSSSGGGGGDGANAADAMALVQGYTAEELAIAGEFLTTWLPFLSAGLCPSCASSLRGRVDSLITRGRAAEESPPVDQIEPSGWDSDPADPQNLPFEPSGWDSDPPPPPPPAPAPAPVEKPRMSWADMAQEDELAAAAEDDAAAAAADEGEDGAEAGRPKVPLTREQREQRRLSSLVRNKEFRCYERVRGQLVNILAGLELHAGVFSAAEQRRIVQCVYDLQARGQRGELGERTYTEPQKWMRGKGRVTIQFGCCYNYATDKKGNPPGIIRTIVSDPMPDLFKTMIKRLICASPEWQWC

SEQ ID NO: 70931 - protein, 534 aa, Zea Mays
MASAKLLYIVVVDENASSFRYTRSLLHSTLQLMGCKPRHAFEISRRVFDVIRGDHQGHGDTATSARVQRYEVAEATPTASPRQFQFELYKRRTTVLLPRDLFLDLVLDALALYKYVAPNQRADLMLACRIRERKESITVLLCGTSGCGKSTLSTLLGSRLGITTVVSTDSIRHMMRSFVEEKENPLLWASTYHAGECLDPVAVAEAKARRKAKKRSGVSSSSTIDYEKSGSLTEKVDGKSIGKKQMAVEGFKAQSEMVIDSLDRLITAWEDRKESVVVEGVHLSLNFVMGLMRKHPSIIPFMIYISNEGKHTERFAVRAKYMTLDPTKNKYVKYISNIRTIQEYLCSRADKYLVPKVNNTNVDRSVASIHATVFSCLRRRSNGDQLYDPEGNTIAIVNEEYKNQCVANSMSSKGMFKLIQRLGSSRKLMAIINVDGSVSKAWPVESSGDGKCSSDNSNKKSVGNPIYGPLNIGRAESVNLQFGTFGISAWPTDTGCTSQAGNADESWVNAAEGSSSHVQSSSGSTKKLDGHCKE

SEQ ID NO: 70932 - protein, 158 aa, Zea Mays
MLSRLPATVSLLRRSLREPRGFSSSVLASSKETADGKLVASVLFERLPVVIPKIHPVVYAFQEFSFRWRQQYRRQYPEEVLGKADARGKGDYHIDYVPAPRITEADKTNDRKSLQRALDNKLYLLLYGNAYGAPDGKPVWHFPEKVYENEETMRLRLH

SEQ ID NO: 70933 - protein, 257 aa, Zea Mays
MASNLLSAVAIEKETPESELPPTFLREDGRGAGSVRARFESMIRRVQGEVCAALEEADGGGARFVEDVWSRPGGGGGISRVLQDGRVFEKAGVNVSVVYGVMPPDAYRAAKGEAGKNEVAADGHKPGPVPFFAAGISSVLHPKNPFAPTLHFNYRYFETDAPKDAPGAPRQWWFGGGTDLTPSYIIEEDVKHFHSVQKQACDKFDPSFHPRFKKWCDDYFYIKHRNERRGLGGIFFDDLNDYDQEMLLNFATSETIC

SEQ ID NO: 70934 - protein, 294 aa, Zea Mays
MPTPLAAALLPLPASPALHFPRPRPGPSWRARPAVVRAAALRALPRRLELCPPCLAAVESNPAPPPLAPPPPDEASAGSGLDARAGGGGGGGDGGGGADLGWLRAFPHVFTASMANFLFGYHIGVMNGPIEDIATQLGFQGNPFLQGLVVSIFIVGAFFGSLGSSALVDKFGCKRTLQIDSIPLIIGALLRYIFTFAIGAGPVTGIIIPELSSARTRSKVMGFSFTVHWICNFLVGLFFLELVHKFGVGAVYAGFGGVSLLTALFAYNFIVETKGRSLEEIEMSMSSATPGKQE

SEQ ID NO: 70935 - protein, 358 aa, Zea Mays
MEEDSSAMEPNRLREAEAAAGELKRLREAGQSQYMYRSIADARVVGGRVCLFAVVSEIGATVHSRGTDFTVTLRVIDESYKSGISVTFFADSTALLPCVKSCGDVISLHNVVIKKYRDFFVQFDKKYSSFALFEGKTYTECSPYQTSIRYHDSEHDKDFLNQMRTWLPQGLKDFTSNNSELYLMNLKSDSTFDLVCKVFHVHVENNNSIFYVWDGTDTPAAEFPAILDAEAAKSLSLHEGPPLSREILCTMPDFGTVLRIFSDRFVNKVSYMQKNIYWARFWNITCKQNFGIWKGTFSDSGGVRLLSNKDDSVVDRLKMYDSRIANRVRRRPMASIPSSVTGDAQIENLGPCCGSTSM

SEQ ID NO: 70936 - protein, 816 aa, Zea Mays
MRYSVGFLIRVAFGYIELCSSNLCWVSGFHVDFWEDPRSEARVTFRSLQRCVLNASVMFHVPCHFLESTVALLLSVESDGRMLILGGPTGEGCVPFMRYSVGFLISVAFLQGVEFQGPMLIFGRTHVLESTMGLLLSVESDGQMLVLGGPTGEGRVTFMRYSVAFLQSVGFQGPMLIFGRTRGFHVDFLEDPWSVVRVTFRSLQCCVLNASVMFHNPCHFLESTVGLLLSVESDGRMLVLGGPTGERRSHVDFWQDPQSEARVTFRSLQCCVLNTSVMFHVPCHFLESTVALLLSVESDLRMLILGGPTANAGFPKRHGQFELALGMPPLCPSQTPWSIDGDVAGHEVAYQLVTRNTQAARRHVEITALTVPTFWGSGHCPEPLVILRKGSTVACYGYPRSHSSSMKRATNWPGKIWRRGDRMDGRQERAKKSWRLGEKMVALGAMGTEVRMVAAVENEATATSRLIVVVRGHGAEHLPEKSRLIRLKKGTASPILMSKVTWCRSAGVKKKANMPQGKSKKNVVKEKAKKIKKNAESRAKVHENTDQIEINIREGVSIWITKAAVQKCFEFPPGTDKKLPIDPTTKTFDSLYRVLSVSEKKINVKKKKMKENMKEKQVEEEKIEMNMEEKKQNLVEDEGSQQEESEEEDGEDGEIGEEEGEDGAIGDAKVGGDGDKESAKRGGIKVAVRRNVLTPLNINLMLQNINNDEILKLLVKRNEDTDGTEPNLDIDLIVRCFFAVSSVAEFGKDKKKLISGCTTVLMVVFLDHLVENPLDPLTIPRINLYTSDFIADLIMVPKDSPGPEKKRRKTQDEKED

SEQ ID NO: 70937 - protein, 66 aa, Zea Mays
MKSVGRSLGHRRTSSSHNRASRVTGANRIAHQCGISIADPPFVVAEAHHDTNLATRLRESEDQVGT

SEQ ID NO: 70938 - protein, 497 aa, Zea Mays
MIEPHFMEDGSIASSYKEKRSCQHNDDSKGEQEKPFLSEGVWSHIHSFMHIRDAGRAACLSRSFLQSWRCHPYLIFTDETLGCKKNTSQENEIASNFYSRVDNILNNHSGIGMKALKIHVPIGYTAKDSRYLNRWLQIAITHGIEELELIFPFMAKYKFPYSLLPMSGDSIKCLELSCCSFCPTSKFGWLKNLTKLCLDGVFIEGDELERLVFSALALERLEIRYCDRIVCLKVPSMLQRLTYLEVYDCDKLRVLDIDAPNITCFNFGRHHTKTKLSIGGGVSKIKELSACFDDAVYYVRVELPSMMANLETLTINSMVEMNIPMLPSKYLHLKYLKISLAAYTFPSTFDYFSLASFFDACPSLEAFFLDAYQRKMKHVSIITNPLVLRGTPEQRHHKLKTVEMNGFTSAKSLVELACHIAQCATSLQSLKLEVHQSDFKCYIPANKHNKCSPLPVEVLMESRRAHLAIMTYIEPIIPSTVKLQVVGPCSRCHALEQ

SEQ ID NO: 70939 - protein, 294 aa, Zea Mays
MIAKSKLTFVRDRIVEEYFWMNGACYDPPYSLSRIILTKITGLITIIDDMFDTHGTTEDCMKFAEAFGRWDESAIHLLPEYMKDFYILMLETFQSFEDALGPEKSYRVLYLKQAMERLVELYSKEIKWRDDDYVPTMSEHLQVSAETIATIALTCSAYAGMGDMSIRKETFEWALSFPQFIRTFGSFVRLSNDVVSTKREQTKDHSPSTVHCYMKEHGTTMDDACEKIKELIEDSWKDMLEQSLALKGLPKVVPQLVFDFSRTTDNMYRDRDALTSSEALKEMIQLLFVEPIPE

SEQ ID NO: 70940 - protein, 95 aa, Zea Mays
MVFFFHIKLRHISPPTHNNNVQMVTTRHINLGAAGTSGGGNQEGNQEVPLPPPTPYTLEQFFTQFLGAQRNMENLQRNMEVELRNIADNTRHGQP

SEQ ID NO: 70941 - protein, 55 aa, Zea Mays
MSTKLLSKTYPTKEKTLKGMLAREIQGMAYQESKTLFCKKLTMSGSLKIQFYLSG

SEQ ID NO: 70942 - protein, 98 aa, Zea Mays
MTCPVHHRTIRWPHLSKLQWSNPNGWMTWLTLGLKTVSEFFGFSGTVFDFFQPNSTITVFFEIGIGDQNFILESVSKSVQPSTDCFLRLPNLTGIYRF

SEQ ID NO: 70943 - protein, 127 aa, Zea Mays
MAKYNVVQKNKRQCNQDRKRAAHGEPGTGKLKQRTAPVSMSGKRKKKLERRLNRKEAAMIKALENNMGDVDMVSVEESSEAAKGKSQVKFSVKKNSRIQIKRLKGKGRKKAKNAKPPAKEKVDAMVE

SEQ ID NO: 70944 - protein, 420 aa, Zea Mays
METYTTDDALTLMGFGKFQALVLAYAGMGWVAEAMEVMLLSFLGPVVREEWNVSPQDESLLSSVVFAGMLIGACAWGFISDRYGRKTVLLLSTLLTSGLGLLSALSINYLCLLVLRFFVGIGVGSGHVFSSWFLEFVPAGNRGTWMVIFSFFWTIGTVLEASLAWAVLSALSWRWLLALSSLPCFLLLLFFRITPESPRYLCAQNRMTDARFVLERMAIANQAALPMGVLTYHQETKTECITHVSEDEHLIPVREKEHTDRNAISSKSGAVAVLHKLLSHNLLKSTLLLWFVYYASSFAYYGITLLTSQLSDVNRSCKSDLVFEVHQNNGNLYKDTFITSLAGLFLSAVLVDWFGRKASMWSMMFACCAFLGPLVLQQTELLTTILLFGARACAMGSFTVLCLYAPEVCIRVLWRIILVI

SEQ ID NO: 70945 - protein, 51 aa, Zea Mays
MWFWVLRYTLFMIMLLLSICYLLFRMIGTWSDHSGKQCYHKGVMGRSWLTN

SEQ ID NO: 70946 - protein, 368 aa, Zea Mays
MGYLPSLSSKAAHFVSDLTTVILSPVSERETSHLPEVDEVLENLDDDKDSEHNSDSLDGPDTSSFRAFLISFLSSSSSNNDSMEIIPEQNGDMGYPTLTPMGKGSKGRTGLLSRGKHSIGKIINKAARISGFKQTTAEPKIDREAVTHTEPDAPVLEHQEPKEVASFGSLPTMSEPSVLLSELMQRILYASLPALAQGRNWVLLYSTWRHGISLSTLYRRSMLCPGFSLLVVGDKKGTVFGGLVEAPLQPSSSKKYQGTNNSFVFTNLHNRPVIYRPTGANNYFTMCSTDYLALGGGGHFALYLDADLLIGSSSNSETFNNGCLSHSSDFSVKDVELWGFVYPSKYEEMLTLCRTEKPGICRWRFPIT

SEQ ID NO: 70947 - protein, 101 aa, Zea Mays
MKAICKYCGTKLTRKRNSCTNSLRNHVADTCPKILVEDRKRFIATMRKKPGEGSFVFDPRKTHECMVKWCISAEVAFNKFDDPFFAPWMESLQPSFSGVGP

SEQ ID NO: 70948 - protein, 174 aa, Zea Mays
MFHLPSLSSSLHCSGCMRSACYITEKASQTFDRIRRWRVTPAQNPSLQLIYLLLAPTRINFRRRPFLFVARLTPTPPPLPWPRRRIRPRRRRPSQPSPEAGSSKRRSGARVSKRRRSTTLCSSTRPPMTSCSPMCPSTSRSPHPSSPSVSGQEQVYNLFLTQATSVRHCSSYES

SEQ ID NO: 70949 - protein, 223 aa, Zea Mays
MSCFDKITRWSVVGIQVVTKCPSGINPLSVHSSTGALLSHILEPLYLSTITIGQLPDGTPERFSIKNNIKKALDARLSSLPTELPPPFKMQKPKVFEAPVPPTEFQQIPGDVRLLTCGYSICWNKSGLHEVVLGTTGRKQGTSSKAAHLPSTESLLCKKRLLEAFVSLEHPLVGQLKCEELSYRALKDTAHEYHHALELLRKAPFFGCWRAKPTFVDSFAVSR

SEQ ID NO: 70950 - protein, 139 aa, Zea Mays
MPISILGPSPVLKSAQTTWFQEIGCAVATGLSLRAGHHFGSVVATSGAAASATRPDRPSAMTAVRGVLGHRSASSNLQALELGTPPTGHQLPAIDLHPQSTHRKVALDISCSNSSTKIAFNTGDKHSRTEVVQNMYCCT

SEQ ID NO: 70951 - protein, 55 aa, Zea Mays
MARAPHRFEQREASGAQQGEEGGSPMDLKLLATVRLGRRKGCSQQPSRPLMQEGG

SEQ ID NO: 70952 - protein, 120 aa, Zea Mays
MASHSPSVFHPYIKWMNMPDLLEVIDFKDTFLDANHVQQSFPDYQEMYEDARQVATDAVGSIGTVASFCVEKRVVAAYRDKCEALRKQGIRMRIFSAYWNSGSDFSVQACISRAHRPALT

SEQ ID NO: 70953 - protein, 823 aa, Zea Mays
MVLGLRTKTRKDSAFHVDFNILIQEISPWPPSESLKSLRSVVLFWENGERNSGKTSTVAPSIGSGSTAGKIEFNEFINLQAIFQKEGSSKSGKWQKNLLELNLYEPRREKLKGQHLGSATLDLAEHAMFHEDTSVPVPLSSKRSFKNNAQPMVYLRIQPLDGDNSSVSSRDALSQEASVDKDSKEFVSATVSEEYTEDTEFASFTDEEEATPYLYRSGVTALTGSNRSHESLKGKDIRLTNNEGTSSSLDSQHEATVSCMKVRNEEVEKFPIQVQKQNGHPENLSLSSDLPREQSPSLPPHNAFRSGRKMSFAYGMTESNQRQFGERTYSTLTTDRARNARFSMRVPDVNGSIINKKVDSQDIAITHENKASVDDGLQVQEPIRISNNRNDNKVRELELKIELLEAELREAAAAEIGLYSIIAEHGSSVNKVHTPARRLSRHFVHALKNCSRDKMGSAARNTTSGLVLVAKACGYDIARLSFWLSNCVVLRAIVTETSRQSGTVNSSNYGDYNSKTTYRKNSASMWESLNRKKGKLLSPEFDNWEDVDTFIAALKKIESWIFSRIVETLWWQTFTPHMQSADITGGLRSTPNPKKGYGKIPVVGNQQQATISMDIWKKAFKEASERLCPVRAAGHECGCLPMLTKLVMEQCIARLDVAMFNAILRESDDEIPTDPLSDPITDPKVLPIPSGKFSFGAGVQLKNAIGSWSRCLTDLFGMDMDDYQELDNEGGENGFGESVKPFYHLNALSDLLMLPKDVLMDTSSRKELCPTFSSSIIKNILDVFLPDEFCPDPIQGSLLQALELEGVYLRIRLLVSQEGNYSK

SEQ ID NO: 70954 - protein, 212 aa, Zea Mays
MDMGSGSSPVITDPISISPPLLGGLTSNLMPFSVMSGGCSSSPSMSASSRRKIEEVLVNGLLDAMKSSSPRKKHNLAFGQDNSPDEDPAYTAWLIVANAQGRRIAVFLDYDGTLSPIVDDPDKAFMSPVMRAAVRNVAKYFPTAIVSGRSRKKVFEFVKLTELYYAGSHGMDIVTSAAAHATEKCKEANLFQPACEFLPMINEVCFILQLLH

SEQ ID NO: 70955 - protein, 144 aa, Zea Mays
MACVMQGRRVGVAYYDSDTRQLFVLEIWEDSVGEFPLIDLDGNGEAPVVKLTKSSTFSYEQAWHILIYLKVAAMDDGLSAKERICFLNSMMDLGSDVQVRAAGGLLAILDNERLLDTIEQMEGGASIAIDSVVQISFYPLMEIN

SEQ ID NO: 70956 - protein, 305 aa, Zea Mays
MSSTAVVLKFLMERNSINALHGQVTVGTLILQDCAVGLLFALLPILSGTSGLLHGVASMTKSLVVLITFLTILSILSRTGVPWFLKLMISLSSQTNELYQLAAVAFCLLFAWCSDKLGLSLELGSFAAGVMISTTDLAQHTLEQIEPIRNLFAALFLASIGMLINVHFLWNHVDILLAAVILVITVKTFIVAIVVKGFGYSNKTSLLVGMSLAQIGEFAFVLLSRASSIHLIEGKLYLLLLGTTALSLVTTPLLFKMIPAVVHLGVLLRWFSVDTNQVELGLKNDVLRIDSGKRINLIVQGSHDS

SEQ ID NO: 70957 - protein, 94 aa, Zea Mays
MAPSPACRRLVVHVHGRDRSGDREAVRPRRPLPPSLRSVEIRPAGVGMHVILCHQASLRHRLPLLLDGVKMCAGRTRFIIRASPYSFLYYSLRV

SEQ ID NO: 70958 - protein, 100 aa, Zea Mays
MARFDAKIVAAVAEETNLPFVTAENKASSKQVDANQARLSVLSVVVMGINKLNVQIIVLLLPLLAVLMIHKVKRRTSLPMYLQILILTLVSIKQRMVHLS

SEQ ID NO: 70959 - protein, 963 aa, Zea Mays
MYLAYGWPQSIPLDPDDSDRVVLLRVLGRLLLAVCPASLHLWSAAQHRVRLARSDRSPESLATHGHNAHAAWSPDARTVAVLTSSFYLYVYKVQHSGKQLIVGGKQVPGLCLASISLIITEKVPLANGVAITSNFVCDSKSMLLGLSNGHVQVVSWNAEFSDSFKLGCYVCSSEKPTAAVDALVFDPPSLRESSNARPAPCCTGNSSIVHVELSVKLRLLVALYSGCRIALCTIGKKGLRQPGSTRVERWLDTDDAMCTSVASEQQILAVGCSRGVVELYDLAENTRHIRTISLYDWGYSVEDTGPVACISWTPDNCALAVGWKFRGLTVWSVSGCRLMCTIRQTGSNSASSPMVKPSALKFEPLMGGTSHIQWDDNGYKLFAVEESLSERVLAFSFAKCCPNRGLSGTTYSHQVLYGEDRILLVQPDDADELKILHLNVPISYISQNWPVLHVVASNDGMYLAVAGSHGLVLYDLRNKRWRFFGDVTQEQKIQCKGLLWMRKIVIVCNYVESSNTYELLFFPRYHLDYSSLLYRKQLLGRPIVMDVFQDYILVTYSPFDVHIYHVVVSGELSPASNPVLKLSTLRELSIMSPKSPPVSMRFIPEQNDKGALTEDTHGFSDLLSQQPSRCLILRTNGELSVLDMDDGHEHTLTNSIELFWVTCSQFEEKGSLIKEVSWLDYGHRGMQVWYPSHGADRFKQEDFLQLDPELEFDREVYPLGLLPNVGVVVGVSQRMSFSTAEFPCFEPSPQAQTILHCLLRHLLQRDKIEEALLLANLSAEKPHFSHCLEWLLFTVFDADISRPSASKNQASQKVDSPKKSLLEKTCDLLRNFPEYMDVVVSVARKTDGRHWADLFSAAGRSTEMFEECFQQRWYRTAACYILVIAKLEGPAVSQYCALRLLQATLDESLYELAGELVRFLLRSGRDFENATSDSEKLSPRFLGYFLFRSPYKRQSSDLKRAPC

SEQ ID NO: 70960 - protein, 58 aa, Zea Mays
MLAERLPATRQFSDLFLMLLQSLRGISLGLLPRNKWRQLWSWQLRGRKRKGPRRRAAR

SEQ ID NO: 70961 - protein, 92 aa, Zea Mays
MYLGQMNSIIVPYISLDWTNPFEVSSCPCLPMAGLEGESSKNKSICDCLFFGCVKAAVTLCWNAIPAVTSHTQTQADVFLTDLHHLNYALII

SEQ ID NO: 70962 - protein, 99 aa, Zea Mays
MSSRPGGGRRPGETSARDRRTSRAGASRRGLMREREASGRRGQQGPRHGALQGPRPATMSPVPAASQRRPHSSGRLPSPRTAVPACRAPHLTVSSVICF

SEQ ID NO: 70963 - protein, 625 aa, Zea Mays
MEDIDCNHDIRIHEDLGHVCRVCGMIVRRADSIIDYQWKKASRRRTNGYGGHSKDADEIDCGTVKLSEDFIVADIAIHPRHARIMKPHQLEGFNFLVKNLIGDKPGGCILAHAPGTGKTFMLISFIQSFMARYPSARPLVVLPKGILGIWKTEIKRWQVQDIPVYDFYSVKAEKRVEQLQILKSWEDKMSILFLGYKQFSTIVTDDGGSNVTAACRDRLLKVPNLLILDEGHTPRNRETNVLESLNRVETPRKVVLSGTLFQNHVEEVFNILNLVRPKFLRMESSRPTARRIMSQVEIVGRSSKGLADGAFTKAVEETLLNDENFKRKAHVIRGLRELTKDVLHYYKGDILDELPGLVDFSVFLKLTPKQKDIIYKLEAHDRFKRNAVGSALYIHPCLSELSEVNAEHRANTFRDDLVDSLVDSITVRDGVKANFFMNILSLANSAGEKVLAFSQYISPMIFFERLLVKKKGWHVGKEIFMISGDTSQEDRELATDHFNNSADAKIMFGSIKACGEGISLVGASRVVILDVHLNPSVTRQAIGRAFRPGQQKKVFVYRLVAADSDEVKVHETAFKKEVIPKLWFEWSEHCTTEDFKLGQIDIDDSGDELLDTKAIRKDIKALYRR

SEQ ID NO: 70964 - protein, 771 aa, Zea Mays
MDRSWIKDRLFSDAHLDGVKEFMNLVSQRFDKNEEVLCPCRRCLNRVHQHKGEVYDHLLIHGMTSTYTRWVHHGEPFEAEINENYDHVDEYIGINEDDGMNENEEDEPDNRIPDMIRELYPTNDQGRGKSMFAALLEEMKHELYPGAPYTRFSFLVKLLHIKSFYRISNVAFTAILKLLSSAFPDCSLPASYHEAKNVINALGLGYDSIHVCPNNCVLFRKEYAKHDECLVCGASRWKDSTDGKKHIPEKVLRHFPIIPRLKRFFASKKISEETQWHLLKRKALENELSHPADGETWKDFDRKYEWFAKDGRNIRLGLATDGFNPFGKMNSSYSMWPIFIIPYNFPPWECVEQSNFMMGLLIPGPSCPGKDLDVFLEPLIEELQELWKGVSTFDALTGKDFDLHAVVIWCIHDYPALSTLSGRVTKGYYACVHCDKNPCSRRIKNKICYIGHRRFLPWDHIWRTKKWFDGKEDHLEKPEEFSTDELMQQLERVKDVRPGQHPQSKKRKREVDGQCWKRRSSLWDLPYWSNLKLRHNLDVMHIEKNICESIIGTFLGIIGKTKDTINARLDLEEMSIRKHLHLKRDGNSYTVPHAPYVMNRSQKLVFCDFLRRVKFPDGILPVAIRGIMHRDIYEAIAELGKLFQQLCAKTLKLDVLHTMKAKIPVILCKLEKIFPPAFFDVMLHLAVHLPDEAILRGPVQYGWMYPVERRLLTLKRFVRNMARPEGSIAKAYVANECLTACSSMELIYLEHQGLHILKIIMTEWFGYTRKS

SEQ ID NO: 70965 - protein, 236 aa, Zea Mays
MCRVIVELAIRCVKSGPRVFKGFTVGFHPRSSEIVYNGFTQPGFEQPHHGFSFQTEQIHVSLYLSAKSSLSGLVGKPTFKVNPVKGLGVTLAGSGFNDAMPSTLSPTVLNVDWRCEIVRTSPYEVHIFIPVEGYDPIEFTLTKKCGYRQEKESDPMKGWAKFGIVSCVFIVLSCILCCGGFIYKTRTLHLMRCLVLRSCLPYWMLLGDQEATCLQLILMKTMQAMHLESTWLVPHK

SEQ ID NO: 70966 - protein, 64 aa, Zea Mays
MNYLVVLLLLYLVLGLILYLNYDHAFNIIVGLIIVHDKIIVLIGTWRTTRENNDTTRVVWDLLG

SEQ ID NO: 70967 - protein, 133 aa, Zea Mays
MGAPPIDRAEIRPYNKPISQSKIFGLIISKSTQRLGACGGQISPRSTRRRKGLARGLRPVTPQGHPFVGRARAIGGMGRPEKAMDSTPSNPSNRALSKETIRLSRAWCPRISGQIRDESAVFSGDQFNRFTII

SEQ ID NO: 70968 - protein, 361 aa, Zea Mays
MLIFTADFLAAMLIRATGHELEMARNRSLKSLDLTKAVKDTVNVSAGDVASLIYLWNPWAIVTCVGSCTSPIENLMVVIMIYGSCSRLAPLAAFGYVMATHLSLYPAILIVPVILLLGYGLDAPPPKVFVIKGSIARKSDVSDNDKTSRQRVVQQFSWKPVLHFIFWLFIWSCHVLLLSSVILKKVGGLHEMFEKTYGFILTVKDLSPNIGVLWYFFAEVFDFFRNFFLMVFNMNIIFMVLPLAIRLKHRPCFLAFVYTAIVAILKSYPSAGDSALYLGLLGLFVNELAEMQFTFFLFFGYIGVSLLSPVMHNLWIWRGTGNANFYFATGLAYTCLQTVLLVESVSSMIKHDRKLRLLVTS

SEQ ID NO: 70969 - protein, 99 aa, Zea Mays
MEQNTNPPLNILRRLDSANAHSDHCVFYFEHFLSRELPVLCLCAHLLTCVRGIAVILVLVCVSFPPLLLCFYCDQHCKGEMLQLVEIPRKREKTAMEEN

SEQ ID NO: 70970 - protein, 444 aa, Zea Mays
MGRGQKSDAREIQTFYHSYYKKYIQALQNASDQLDRAQLTKAYQTAAILFEVLKAVTQQHAVEVDHEILEAADKVKEKTKIYLPFNILPLDPDSGNQAIMKFPEIQAAASALRNTRGLPWPKTYEHKVNEDLLDWLQAMFGFQTDSVSNQREHLILLLANIHIRRNPKTDQQSKLDDNALNDVMKRLFKNYKKWCKYLGRKSSLWLPTIQQEMQQRKLLYMGLYLLIWGEAANLRFMPECICYIYHHMAFEMYGMLAGNVSALTGEYVKPAYGGEKEAFLKKVVTPIYHTIAKEAERSKREKGNHSEWRNYDDLNEYFWSADCFRLGWPMRADADFFCQPDERNESTRISKQKGKVNFVELRSFWHIFRSFDRLWSFFILALQVMIILAWDGGSLASIFDYAVFKKVLSIFITSAILNLGQATLDIIFNWKARRTMEFAVKLRY

SEQ ID NO: 70971 - protein, 545 aa, Zea Mays
MTSLLLPPPQAAAAAYGCCHCLLLASTTVPARSGCVGRASRITLALRCLPITGLRSRKVACQATTETEPEGNGDEEDKKEFGDDASSPSVYNVAEANGPGENDSSLDNKKDETTNAEAALLSSGDTVQDMDADATSTNGIQENVEVIEVASGSPLPGMKLDDSVRIPKATIDILKDQVFGFDTFFVTSQEPYEGGVLFKGNLRGKPAKSYEKITSRLQNKFGDEYKLFLLINPEDEKPVAVVIPKQTLQPETTAVPEWFAAAAFGLVTIFTLLLRNVPVLQENLLSTFDNLELLKDGLSGALVTGLIIGVHEIGHILAARESGIKLGVPYFVPSWQIGSFGGITRIVNIVRNREDLLKLAAAGPLAGFSLGFVLLLLGFVLPPSDGLGLVIDPTVFHESFLVGGLAKLLLGDVLKEGTQLSINPLVLWAWAGLLINAINSIPAGELDGGRIALAMWGRKVSSRISSLAIGLLGVAALFNDVAFYWVVLIFFLQRGPIAPLSEEITDPENSYIGIGAAILLFGLLVCLPYPFPFDPSQLTDMDFNF

SEQ ID NO: 70972 - protein, 91 aa, Zea Mays
MTCYTIFLCSISSSSISSVLLEVCSRGGVRRRYILLPHTSTLAIQILMLERLPHQRKRGEPQPGVKEYYGMEMALQQSVSLSKSQNTALDQ

SEQ ID NO: 70973 - protein, 70 aa, Zea Mays
MYDAFGVRLHAGKQAKVLNQIVYELPLEHPLAETRPLRELLGHTPPQVFAGGVLGFAVATFIAMIAGLGS

SEQ ID NO: 70974 - protein, 2507 aa, Zea Mays
MLDTRDKVQFCLTKGEMSIVEDCWQAIWNSLVHAFPLLSSIDLVADSALILLGGMIMRDQVHTSFLSEDTWNLQIFKKFPSPSALYFVACYFSRIGFQGDLSNSIFVRKTLLRSTLELIHSKEFSLLNEQNVVIIPEAIFSLCAGFSSPVINSSDILQLFGHCKIHSKMSLEDDNWVLKDELPYSVEALSEITLDTCTKVMSHKCHLIHLPGTIQQPMLLELMEFMKGFVASNEQFEKVDLNNLVLVCSLLCNLIHCALLSRTMEEKSSLLQETVDYVTNILKHIVSFVVKKNDELSHGLTNISSALDTMGSAFSSIKSLLSSPIFNLSRVDNGVCSVVIKSITELLDELLVAISQLFCQISSLVSNFDAESTGKMLPTSSINLEDLNPVLDCKSSVADMDLDVMDSSEVDSVTASASGSMGSFLRPLEWKLDLVCIISTFFSVSSLHTWEILYSLVDKEGDVKVRQAILLNLCRNISASSKTVSLVVHFIVDMRDRGASSLLGPAECLTHIHALLKALIAIHGGQNADGKQPGREVFFSENQDILFDLLNRATDISSVDWFSRIKFIDCVSSFVCLFPDVAQDLIGCLLDMLHDADYRVRLYLARQIVVLFQTWEGHNELFNDVCSSIGAKMVKFSNISPVTAREVLAVGPQSVLVIETALITLAHLAVHSEDVEVECLFMISAAAAIEPSQRELAFALFDSISRRLGYASRSKYLDQVMGPILFRWVACEMNLISLVEVQEMFGYGSAEPNNFVEHCSSWLLPFLILRGDGADMNWISKILSQPLSIIIKRYFVPIFGMCIAVRCGTGPEKDLAETVLCESVLQLGEISELERDDLIKKHMVAIVAFLLSVSSSAHGPQIPYFSKKNVALSVRMVVDGFVDTMDDNLADTVVSDKVNIFRADRVFKFLLSIHQQVADASHSRHMGHRLCAIEVLIDVLGHRVVLESTCFYIISIVGNYIQQKPLQGQCCNILSKLLAAFDGNTSAETLQVLGRQLQVVVPKLIFSCLINEKEERSGTEDSSRVLSLLHQLTVEIDPLLYDYIRELEPLPDLDCLKDVQEFHASLSASHSSRNQFLKFVNKAPYLPPELFLLSLRAYHKKLFLGEIIRRSDLSAADTNMVSCWHSDPDVISAVWALVDICSSSSVANEASWVLADFISRAGISDAHQVIFRLPTTTENYSLQLHTGSASKEDKLSTNYGISDDVLVGLLKLLKTYLSDESVEIIDAASQTLRGILSTARGLNALQFLDSPDRSLLMVHSRGVNIQIVEQTISQMEQCAGVSLDDADVWDTDGRTCKQWLCTLVSSLICHCEDTILRLCRSIVFVKVKAAELLLSSTLVNIAGNVDSNTAICKLISTKVEKIIFSDSNHSLKSIHLFLDALNVIRSFYVAEKARTFPSNTLKDGRSARSKSRSPVTTPSSSWKKVYWLSVDYLVAARAASRCSCDFAILMYVELWCEEQFNRLVLGPPEFSNEELLPPHVDLLVAAFTRINEPDSIYGLTLSNEIASQLIRYEHEGDWSSALEYYDLLVRSMPKEHLGTLTGSVLTGPSTVSSRAEDTMLNWKMHKGLMRSLQKTGCSHVLDVYCEGLSHQKGCLQQDAEFIDIQYEAAWRAGNWDFSFFVPYSSWSSTRSRSSCLFNENLHSCLRALQNGDSEEFHAKLCQTKMDLVLALSNTSKESTKYIHSTILKLQILDHATMVWDLRWNLNPNQTSKSPVTKEFSHISTVPKGIQLELLDKEWNLIMFQAERNLDLFEPFLAFRRALLKILGCEEHLVKHLFQSASALRKGLRFSLAAAALYELKELCFHRDESTMTNTYLLARLEDAKLLRAQGQHDMAISLGKYILQKLSDKKNLSDVYRLVGKWLAETRSSNSRTIIEDYLRPSIDLSEFEKSTDKRYMSRQCRTHFHLAHYTYSLFRSYEERLSSNEWQAALRLRKYKTRELEILIKRLRSSSKGVKTDYSVKIQELQKQLALDREEAEKIQDDHDNFLNLALQGYQRSIVVGGKYDLQVVFRLVSLWFSLFSRDQVVKAMLKTTKEVQTYKFIPLVYQIASRLGSTKDAQGSFNFQIALASLLKKMAVDHPYHTIFQLLALANGDRVKDKQRSRSSFVVDMEKKLAAENLLKELSSCHGPLICQMKQMVEIYIKLAELETKKEDTNKKIPLPREARSIGQLELVPVVTATVPIDPSCRYEEGSFPHFTGLADSIMIMNGINAPKVIECFGSDGNKYRQLAKSGNDDLRQDAVMEQFFSLVNTFLQNHRDTSKRRLKIRTYKVVPFTPSAGVVEWVNGTVPLGDYLIGSTRSGGAHGRYGIGDWTYLQCREYLMSVGYIVGLGDRHSMNILIDQDTAEVVHIDLGVAFEQGLMLKTPERVPFRLTRDIIDGMGVTGVEGVFRRCCEKTLCVMRANKEALLTIIEVFVHDPLYKWALSPLKALQRQKETVDTDSCLDDSQEPYDGNKDAARAILRVKQKLDGYEDGEMRSVQGQVQQLIQDAVDVDRLCQMFPGWGPWL

SEQ ID NO: 70975 - protein, 171 aa, Zea Mays
MGQFVDDDIRDLPRSPWRRSTPPSPPRTTSTSASSGSASSTATSTSVVVAVGRSDPASVTQTKQPSVPVQTTYLVSRFFMALTLKDQSILVNGDINEGLLRLCHKLHRLRKEYAYTFESTSLSYQCSEVSRILQGYKVVHDIKRFVGHNLYYMKIMGVSPKFTFSAIYRFM

SEQ ID NO: 70976 - protein, 535 aa, Zea Mays
MPQPTADSSTMVAGEHQQQQQPATARISSSSTSSGRLVTPFWKEKYERDARRYWDIFYRRHEDKFFKDRHYLDKEWGKYFKGRDGEKKVVLEVGCGAGNTIYPLLSTYPDIFVHACDFSPRAVNLVKKHKDFKADRINAFVCDIASEQLTENVEPSSADIVTMIFMLSAVAPDKMPIVLENVRSVLKHGGRVLFRDYAFGDLAQERLMSKGQQISENFYVRGDGTRAYYFSNEYLVDLFSKCGLTLEEICVHNKQVENRSLELVMNRNWIQATFTLNSASPQGPNGQHDLLAYEGEDDKVQIIGVKAKGHDFKIRMLRKEYQHTCRSTGLMLWESAQFMCCLLAENPSIVASKRVLELGCGSAGICSMVAASFTPFVLATDGDEESLDLLRQNISSNMEPNLLSRIMVRKLFWGNEDDMKAVRELHGNGVGFDCIIGTDVTYNPDAILPLFKTARGVISEKANEDSVPALILCYIQRRVDEDSILSNATSQGFRLVDKWINGVHESNGTISSWFSGNDVCSAFRHTVLSVLYFEL

SEQ ID NO: 70977 - protein, 78 aa, Zea Mays
MRRRSPIRTWATSIFRNYKGNVSIVRRIFLVIEAPLFLLASDIFFFFLQQQLLSVLASTADNKLIDFQLLLGFRNTAK

SEQ ID NO: 70978 - protein, 195 aa, Zea Mays
MSAPSAPPRTVICVGDVHGYITKLESLWSNLQAALPADAFATALVIFLGDYNDRGPHTRRVLDFLLALPTRYPAQRHVFLCGNHDLAFAAFVGALPPPPDGSPFSATWDEYIHNEEHEGWFRGPGFEGMHVQGRRWGGVIKERWNPKKGLPYKGSIYDAQPTFESYGVAHGSSVINQLQFAMEPIVRFTILLELW

SEQ ID NO: 70979 - protein, 54 aa, Zea Mays
MGVCEIKGLCDDEPSVATMISSFKSGTSLRYQVLGNNMKCRPDVEQESLPVCVD

SEQ ID NO: 70980 - protein, 62 aa, Zea Mays
MRSLFLPVIIGFWRLWIMGIKGLEVGFDVGLGFDLEFSFLQNGRFDSFCSCQFSVVLVASKK

SEQ ID NO: 70981 - protein, 59 aa, Zea Mays
MPLQSSTSFQKPATVYGKITCKNPSSDRHRNKINPRTSLHAIPLLPLPLSGKVVFHYLS

SEQ ID NO: 70982 - protein, 503 aa, Zea Mays
MKYVLVTGGVVSGLGKGVTASSIGVVLKACGLRITSIKIDPYLNTDAGTMSPFEHGEVFVLDDGGEVDLDLGNYERFLDIKLTRDNNITTGKIYQSVIDKERKGEYLGKTVQEWIERVAKIPVDGKEGPADVCVIELGGTIGDIESMPFIEALGQFSYRVGPGNFCLVHVSLVPVLNVVGEQKTKPTQHSVRGLRGLGLTPNILACRSTKELEENVKEKLSQFCHVPAANIITLYDVSNIWRIPLLLHEQKAHEAILKVLNLERMDSIAREPKLDEWIARATIFDTLHDTVRIAMVGKYTGLSDSYLSVLKALLHASVDCHRKLVVDWVASTDLEDSTAIEAPDSYKTAWNLLKGAGGILVPGGFGDRGVQGKILAAKYAREKNVPYLGICLGMQIAVVEYARHVMNLTDANSTEFDPNTKTPCVIFMPEGSKTHMGATMRLGSRRTFFKIADCKSSKLYGNVTYVDERHRHRYEVNPDMVPEFENAGLQFVGKDDTGRRMEG

SEQ ID NO: 70983 - protein, 2706 aa, Zea Mays
MDHRGGGGGGGNKNRTDLLAAGRKKLQQFRKKKGKRGPGNKADADADAEAGEGAPKAAEESVPEPKSPVGLKLLAGEGGGGSTPFEEAERSQAEQCNGEGPGTAESSSVESSNAVQEQETVQEQETDDVSDAHHVGPSEQGISEHPESQTAGGRDLSLQATSGDSIGDDNVGRAQLGDVDSMELNASSEGNGADGDCNQLGEHQQVEMDAVERPTSSSFEEFTELPIHSQGIEADNIHGEGAQEMVMDVSGRPLDGDIQHDIEPTASAEIDAETALEESTVAASIVIPESTARGTEYERDTGYETDGVDKEALLEDPSMVHVSDEAVTIDDLSVQAKPTASADMPLCEQKGDPALSRSAVLQGIMPLHFEDIQNHMFSATLSRDFLQLQLDEAAGLYSDFTQQSSDNTTQLRVLLKETEESKLAVDRELHQCRHELSKVNIEKGQLELTMASLKEEINTSNTRCTYLESELHSSKESTEQIHSELANSRLLLEALQKENMELTASLAFEKEAKKEVEEQRDHLSSDNRKLLSELSGLELSLASVKEEMDASSSRCNVFECELRSSNENMNHTLTELANCQALLETLQKDNLELSANSASEREAKMKLQEDNLYLCNEKGKLSSNLRELNDKLEVSYAKHKQLESHVKDTETYFGQLTEQLIEENLYTSISIDIYQSTTKDLDTKYNIVLGQFQNIMRQELHLDSSEVTTENAERAIMTPRHDSHGNNQCLLNLVNANDSCNSTALLSLKGHLEVAKSDLHNLEKLLERISSRSDGRVLVSKLIKSFESKGSDDDTGLSEGEHDNLQKSTREMLSCLGEKFIAMSSDITKTEEYLAELCNKIELYVKSTVQHDRDRQCTVVLEAKMDELAGKLSNYKETIDNLHNQVAIVQQDANSNAGKLIDQAELLQKDAVERISILENERMSLSDLLSEVTNKLTSLGDAVFPSGSSEIEGLNFCTLSCVDLVARSFQSLQEKLEAAQIDNAQLNSSLVELRKAIGVAQERSEHADGIVKKLYDSLQELLCDSLGSSNEFGARYSVEEPIESQYGRLIAHLKNLLHDHHSALSTNAELELSLLSKCEEVEELNMRCSSLLKKLDEVCILNEELKSASSSKNVTLDKLHSRCLTVAEMLASCSANHSSTVQLISDIGEGSSKEDHILTTLLPCIEADVASCIEKFENAAEEIRLSKICLQEISIFDQISFEKWSYPLPTLIKEEVLPKICDLQDRFDQLNALNIQLETEVAVLKDGMKELDEDLGTSRSELQKKVSELEQLDQKFSSVKEKLSIAVAKGKGLIVQRDSLKQSLLEKSGEIEKLTQELQLKETLLKELEAKLKSYTEADRIEALESELSYIRNSATALRDSFLLKDSVLQRIEEVLEELDLPEQFHSRDIVEKIELLSKMAIGTPFTLPDGDKGSSVDGHSESGVAMNVIDDEQNSNSNSVSDEVKSKYEELNRRFCELAEQNNMLEQSLVERNSLIQKWEEVLGQISIPPQFRMLEAEDKLAWLGNRFLEVEQERDSLQLKIEHLEDSSEMLIADLEESHKRISELSAEVVAIKAEKDFFSQSLEKLRFEFLGLSEKVVQDEFVRDKLRMDLSELRDKFAEKTEESRHYHEMDTEVHKLLNLVQNTLQDSTNSEISSGGISAVLCLGKMLKKLLDDYGTLLYKSTEGNFAERDIQLEDIKPSKDASKSDTGAYEKEMELNSLNNELDHAHNNLALAQQECDEAVEKAQSLMMEIETLHAQISKLQESDAEQMQKKEMELNSLNNELDHARNNLALVEQERDEAVEKAQSLMMEIETLHAQISKLQESDAEQMQKYQSLVLELESVGKQRDNLQERLNQEEQKCASLREKLNVAVRKGKGLVQHRDSLKQTMEEMNVVIEKLKSERKQHIESLETEKSSLMDRLAENEKSLHETNQYLSGLLNALNRVDVAREFDMDPITKVEKMAKFFLDLQSTVASSQNEVMKSKRATELLLAELNEAHERADNLQEELVKAEAALSESSKQYIVTESARADAVRQLELIMHAQSQTRRRQADHLLELNSTSSQLREVCFELSHCLVNTFSKDVDLICYVVNFMRSSGKLMDDTNTMDIPIASKHVLSNRTNNKKAHIPNAPLEIKTDDTDDSQFLHHLAIACHALSDCVKDCNDLKRNIDEHDFSVEQKATELFDVMSTLKNRFTSQHNELESLRAKFVELQSEMEERDKEIIFAQRNMSLLYEACASSVAEIEGISDIYPGKHSYAVEHSADECIKSIVEQLVMAVKTSQNSNEGSTKELKAIVLELQQELQAKDVQISTISSDLSYQLRVAESSAKQFSVDLEDARMELQNLEKQVDVLQNQKKDLETQLNELKNMESMASEQHGRIEKLTDELSRKDQEIEGLVQALDEEEKELEILENKSLQLEQMLQEKEFALKTSEVSRTKALAKLATTVDKFDELHSLSENLLAEVENLQLQLQERDSEISFLRKEVTKSTNELLTTEESNKNYSSQLNGFMKWLERELLQFGFHSESANDYDYTQFPVYMDMLDKKIGSLIAESDDLRVTVQSKDSLLQVERAKIEELMRKSDGLEASLSQKDSQIGLLRRDRASNQQSRSINLPGTSEIEQMNDKVSPAAVVTQIRGARKVINDQVAIDVEMEKDKPFDDEDDDKAHGFKSLTMSRFVPKFTRPVSDRIDGMVSGDRLLMRQPTLRLGVLIYWIALHALLASFI

SEQ ID NO: 70984 - protein, 524 aa, Zea Mays
MRNNSRLQQLGIPALVSMCGNINSISRNKKPNNRDNEDSESEYDPSHDDSIEGDLFDHDDHNKKGSKDTNRRTIHMAPGGIKPRTKRVYAEQHTTRNTRSKKSIAQPDTSLTRSDIYVPPPSLSHLTQVGEVARSIENHRKTSVEANGPTQVDNTHMANRDGFDQFDDNMTNQGEGITQPGGKGVNQHRERGLNMGLGLQRMNRARRGKLPIVITEGRIRPVAPIVAAKFATECNIAVRNHVLVLKSWKEYEKHPGLFKLFTAKLSAKFDINTEDALVKNACFQMMRNALRQQRYKLKKQYFDPFPLHLVRKTSPIKSTSDEQWNDLVEHWKGPKNMATCEHNKGNRGKVKFHQTTGSRSYMVHVENLGDKYMDQEPDALDLFKECHYSKKKQGYTSTVQLAITQMEDKRSTPGEGEQPMSTTQVVADVLAENTKKNRFLQNVGIQNARPRSSVQNIEAQLEVERKANAELQSLVSIQRERMDVLLKQVHEAELVRIREQEEMKKKQDAMDAQLELMLSQIQPS

SEQ ID NO: 70985 - protein, 267 aa, Zea Mays
MSFIRKNMSTSGVVLEDFDSHFSNRFYHSYLDNSVNINSSSIAAAAALVARSMYILASDDSVVDLITLNTIKVNVSLVEELIGCLLTCNPGLSCGLVKRFISPSNPCPSHYVGVFLDDPSGTQLPSYADDTSRFVWNFLADRTNSAGNKSSCTGKCGDEGEVCVGAEVEGGGRCVVSTTRYVPAYSTRVKFEDNAWHVLPANSSDPMGAADPVWTESFWNTIGLRVYAVQDPAYDWLILLAGLGITAASYCAVHFGRAYISKVAKLD

SEQ ID NO: 70986 - protein, 146 aa, Zea Mays
MSRGPWPDLEGAMSPSASFYTAATMLPQTTYFMTDPDKIIDFPIPGPPSFSAASEATTVAAPKWMPTPAFYRFMDKTNNIVYTNRSNNGLQNTEQQKISKYINTHVTEAFPMRKAGKFGNENCKNIVKVSKSVDSATASSFAPSSL

SEQ ID NO: 70987 - protein, 135 aa, Zea Mays
MAKNKGIPLAPREEVEDADDLRMAVKEIICDSETGRQEYEEAVIAITVEQSLKRYCQRIRRPDFWGGESEFLVLSRLCRQPIIIYIPEREYHGRGNGFIPIAEYGLEFTKNTKQWKKKTPVRLLYSGRNHYDLLV

SEQ ID NO: 70988 - protein, 502 aa, Zea Mays
MGSKSVDEVLDAAAAGVHYSALRLDGQASATTSGLENGHQEPFVIGVAGGASSGKSTVCKMIIDQLRDQRVVVVTQESFYYGLTDEELVHVHNYNFDHPDAFHTELLLSCMQNLKCGKAVDIPNYNFKTYKSVPNARKVNPSDVIILEGILVFHDSRLRDLMNMKIFVDTDADVRLTRRIHRDTIDKGRDLKAVLEQFSKFVKPAFEDFILPTKKYADVIIPRGGDNDVAIDLIVQHIRTKLGQHDLRKIHPNLYVIQTTYQIRGMHTIIRDAATATHDFIFYADRLIRLVVEHGLGHLPFQEKQVITPTGSVYTGVEFSKRLCGISVIRSGESMENALRACCKGIKIGKILIHREGDNGQQLIYQNLPKDIANRHVLLLDPILGTGNSAVQAISLLLKKGVQEANIIFLNLISAPQGVHVVCKRFPRMKIVTSEIESGLNDDFRVVPGMGEFGDRYFGTDEYQSSTPFFCDDKNRVSYSPFLLPLVRMLIRGLSLRSSNFL

SEQ ID NO: 70989 - protein, 439 aa, Zea Mays
MKKLLLTSNTAAKEVLQILHDEIVVKLKSVGKSDNAWMVVQTQNHDAEDSLLKWGEHLGIKSRLQIAYFQGAGRGMIASESIGVGDIALEIPESLIISDELLCQSEVFLSLKDFNNITSETMLLLWSMRERYNLGSKFKPYFDTLPANFNTGLSFGIDALAALEGTLLFDEIIQARQHLRQQYDELFPLLCTNFPEIFRKDVCTWDDFLWACELWYSNSMMIVLSSGKLSTCLVPVAGLLNHSVSPHILNYGRVDEATKSLKFPLSRPCDAGEQCFLSYGKHPGSHLLTFYGFLPRGDNPYDVIPLDLDTSADDEDITAQSSATTSQTTHMVRGTWLSTSGGFPTYGLPQPLLTYLRAALGCEVDEPAAEADMKESDKVVLETILSIFSPMLEALLPEQDDPNRESASWDVKLASDYKDLQRKIVSSIVTSCTSALENL

SEQ ID NO: 70990 - protein, 82 aa, Zea Mays
MESTCSFPSKELSTRKTRSQLPSLPQRISPQPQHLKPSPIFMHNQYTSGHGRRCDLAFHPATGLGDRVGCCSSRRGAGEVVG

SEQ ID NO: 70991 - protein, 880 aa, Zea Mays
MADLVCALCDNGGEIISCEGRCLRSFHATNDSSEDCPTLGYSRQQLDAAEVFKCKNCEYGIYQCFACGRLGSAKTNPPEVFPCASSTCGHFYHAMCVTQLLFPENEAKATEYTAKIASGAKFACPLHKCGICKHGENKEDRELQFAVCRRCPKSYHRRCLPREIVFEDFTENGQHVFQRAWDDLLPNNRILIYCLKHDINPEYRTATRNHIKFPKDPTALKKPLNCVNGMNTKTLKIRRLEELPSAPLSNVKRFSYSVKSSTLSNLRNKRRKVIVPEEKPVVMTKLPEIDSDTEMRMYEFAQKASAGITMDDVKKKLVVPSTYAPNLQNADNITLENVEIYVEAVKGALHMLENGASIADAKSVCPPNVLFQLVKWKNKLSVVLAPFLHGMRYTSYGRHFTKLDKLQLIVDKLQWYIQSGDTVVDFCCGSNDFSLLLREILESSGKNCFYKNYDLIQPKNDFNFERRDWMTVQPDELPTGCRLVMGLNPPFGTKASLANQFINKALTFKPKLIILIVPKETERLDKKYPPYELIWQDSDQLSGKSFYLPGSLDADNKVMEQWNVSPPPLSLWSRSDWAERHSEIAKSMGHISNEIGDLQRDLAASIHTTEHVEADDAGVAGMSPCLLDQLLSDTFHDPTTSPGDCWNDTSGRSRQPCNYETAGQGRGDPTYNHTTESCSDMSISLSESDVQRKDQALPMPEHGGTGSDMSISLSESDVRRKGQAWDAVGSASAGKPTADADYDEVTSACGPYHFSGVAGKQAAGVEYWMIQDSPVLEEGELSDAPAAAGRPASGTRHKPTEHTPAAATPEAASWWSGQLDHHSRSVAARHNARTLPPRNTFPGLRLRQGCNTSRKFLPQGMGYDAIHEGPSNGWIEEEDY

SEQ ID NO: 70992 - protein, 1087 aa, Zea Mays
MVNAEPCSMGGIMDYGVGVGTKSSPRSMAIEKAQEELRQESDVRDEWRRELEFLEKVCPHQGGNPLDFNFAHLETVGVHSASLTNQVEAQTVISDAKGSFSASPLGDSVESTDKPGGSMCRETNTADNLMLLGGGKNDIAEEKVVKRGTKRLNAAQPKHSLPSDGHKNTKKPAASGLSHLGVKSQAYVRRNRSKPSRESGNVTSIRSSMIPAKVYEPNDEKVTAQKNNADDHGVLSVSSIKQSGPNRDIAPKSIASDDHAAMELDGIQTILESECVVNDKVNKAGNNNKAKQLSSNDTNHDRFLVGCGEIAAEVSSAETPDANLKVVIKPCYSSASTYDEKESCAVHEKADDGHLDECMAHIREGELGHSRTLPCVVEASTSHNDVVGPSCEGTVNIVDEHADGDINTVAGKIDSHEDLDSSRHSNMILKVSGTSIDFSRPASLKESSDLVRPEASNISHVKDEIEVCNSAIVAQKDTECLSSGRSMNIEESPVSVRKNSYVGNSNSAHPISVGIDLSDALSPPKNDESNVESEIKKYENLNKMEKKAYEDSILKNARVIEANIKKAGQRSPCNIALEKRRKSHWDFVLEEMTWMANDFMQERLWKSVAAAQVCHWIASDAHAKFEKASILKKQKAVIKIIAKGIMSFWRSAEALQTADRTAKVMPHNSTMLEEIDPSGVKAGKEQGHNSLEAKESSQQRSQIHDYAVRFLEYNRTADLHVLPEAPPTPDRLNDFGVLKVSDHLSEESLFYTVAAPGAVLAYRDSLESLFMYHKEDGNAELNDDYEASACDSVAVCSDLPQENAYEEDEGETCTFLSPKAYVGGSISNMVHKKKHVMPQRISLARPYEIGTYVPYQPCMESKSRNQPLLSNGKRPTSFLAIPPKRTRTAARQQVVSPFHAGASVPPQDFSSGNTNSYQDDQSSLHSESLPWRNMDFESTVDSDRQLPYDAGEMCTKVNNKKKLKNSGYKIAQNAANLYVPTSAKFQGHIYDPRKQMQVDLVNKYEQEYLKKRTDVHQYGSNGNKVAYGGQHASKKLKMGKQGIDISQETSVASQMSNMAHPARFIKIIANRDRGRKCKALKITRILG

SEQ ID NO: 70993 - protein, 458 aa, Zea Mays
MSSILPSGLNCLQQDIPCFRGSPEYSSIAVDCGSNKSFRGLDNTFYEMDPTNIGAASYYVTGQTRWGVSNVGKFNEAPNGSYTIDSSEQFQNALDSQLFQTARMSPSSLRYYGIGLENGNYTVELQFAEFAYPESPTWQSTGRRVFDIYIQGGLKEKNFDIRKTAGGKSYVAVYKKYNATVSKNFLEIHLFWAGKGTCCIPTQGYYGPMISALSVTPNFTPTVRNGVPKKKSKAGAIVGIVIGASVLGLAALAGIFMLVQKRRRAAQQQEELYNMVGRPNIFSNAELKLATDNFSSQNILGEGGYGPVYKGKLPDERVIAVKQLSQTSHQGKSQFVTEVATISAVQHRNLVKLYGCCIDSSTPLLVYEYHENGSLDRALFGDSGTILDWPTRFEIILGIARGLTYLHEESSVRIVHRDIKASNVLLDTDLTPKISDFGLAKLFDEKKTHVSTKIAGTL

SEQ ID NO: 70994 - protein, 351 aa, Zea Mays
MEARPEWDLRKMRELRFVVLLLVISLPCFSASDRQGDALYDMKQKLNVTGGQLSDWNQNQVNPCTWNSVICDNNNNVIQVTLAARGFTGVLSPRIGELQNLSVLSLAGNRITGTIPEEFGNLSSLTSLDLEDNLLVGEVPASLGNLSKLQLLILSQNNFNGSIPGSIANISSLTDIRLAYNNLSGQIPGLLFQVARYNFSGNHLNCGPNFPHYCASNTSYPSGSHNSKIGLILGTVGGILGLIIVGALFLICNARRKSHLREVFVDVAGEDDRRIAFGQLKRFAWRELQIATDNFNERNVLGQGGFGKVYKGVLPDGTKIAVKRLTDYESPGGEAAFLRESACWSIHLCRI

SEQ ID NO: 70995 - protein, 88 aa, Zea Mays
MRGTHRRARAAARIGFGGGTGVVFIRLHQRAFASSSVPGRPGPAAPCCSDWIACFRSKFRRQGSTEAGALLESESWVGARGRARHHCT

SEQ ID NO: 70996 - protein, 156 aa, Zea Mays
MAYVSPATDDTSTDLDTDEKNQMGLPSGRSSASSAASLHQRQPQSDIHSHEYHQLSLLLMLASLTSIFHPLVCLVDTQMAKPEYQAMETGRESKETTPRFVNVSGMAKPQPDASLSFLLPPDAAAEGLHDMILNARDDLDVLSPWSVGASACGVGR

SEQ ID NO: 70997 - protein, 111 aa, Zea Mays
MSADSCAGEPFSVARRGRAVLSCSSWSSRSQLLPVVVARLRVARALLAPAAGCRALCARTTRSFFVCRAHENSLLAMACRVSASSSSLACRSSSPSRFLAVTVFLVIRLRR

SEQ ID NO: 70998 - protein, 978 aa, Zea Mays
MKGNEVWAFVMLEAIQEEGAKKEQEPLRQILKEFEDVFAVPTGLPPVRMYDHHIPLLPGSIPVNSRPYRYSPFHKTEIERQVTELLTAGLIVPSASPFASPVLLVQKKDGSWRFCIDYRRLNSMTIKNRFPMPLVDEILDELAGTQFFTSLDMTAGYHQIRMAEEDEGKTAFKTHHGHYQFRVMPFGLTNAPATFQCAMNTVLEPFLRKFVMVFLDDILIYSPSLEEHYKHIRRVLSKLREQKFFLKHKKCVFAKKELRYLGHIISSEGVATDPAKTAAMLAWPRPQNITELRGFLGLTGYYRKFVCGYGVLARPLTQLLQKQHGFKWNDEAQAAFEALKKAMTTTPVLALPRFDLPFVVETDACDTGMGAVLMQQGKPIAYISKALGERNRHLSIYDKEFLALILAVEKWRPYLQRSPFVIKTDHKSLTFLGEQQLQSELQRKAMARLMGLQFQIVYKKGVENRVADALSRVGAMMELAVLSEVQPVWIQEILNSYETDAEAQELITQLLVHSPNEQGFSLQQGIVRKGDQIWIGSNSALRTKLIAALHDSAMGGHSGIHATYQRVKKLFWWKGLKVDVTQFVQQCLTCQQAKPERTHPAGLLQPLPIPHGIWADVTMDFIEGLPKSEGYDTIMVVVDRFTKYGHFLPLRHPFTAQGVAQIFLDQVVKLHGPPKSIVSDRDKIFISSFWKHLFQLMDVKLLFSTAYHPQTDGQSERVNQCLETYLRCAVNAQPAKWKLWLALAEFWYNTTYHTSLGCTPFKALYGYDAPMLALPQSGVPEEGSVTDWLADRVAFSTHLKEQLARAQNRMKQMADRGRTAREFQVGEMVLLKLQPYAQKTVVNRPCPKLAFKFFGPFRVLAKIGAAAYKLDLPADAQVHPVFHVSQLKPYYPSYTPVFTSLPPLVDLSRTGIVPEEILDRRLVRKGHQAVPQVLIRWSGVPVESATWEDYYVLKNRFPDAIAWGQADSEARGIVMSEQ

SEQ ID NO: 70999 - protein, 67 aa, Zea Mays
MLGAKITVFHRTPFIKFRLWPCLIRIIGHDLFDSLLIIILTGRVSLYIVTLAQSICLARDVLLVTSG

SEQ ID NO: 71000 - protein, 636 aa, Zea Mays
MKYVLVTGGVVSGLGKGVTASSIGVVLKACGLRVTTIKIDPYLNTDAGTMSPFEHGEVFVLDDGGEVDLDLGNYERFLDIKLTRDNNITTGKIFQAVINKERRGDYLGKTVQVVPHITDEIQDWIERVAVVPVDGKEGPPDVCVIELGGTIGDIESMPFIEALGQFSYRVGPGNFCLVHVSLVPVLNVVGEQKTKPTQHSVRGLRGLGLAPDVLACRSTEPLEEHVKAKLSQFCHVPVSNIVNLHDVTNIWHIPLLLRDQKAHEAILKVLDLQYDGKVPREPELTKWTKRATKFDKLKTPVKIAMVGKYTGLSDSYLSVIKALLHASVAMERKLVVEWVPSCDLEDSSAKETPEAHKKAWKLLKSVSRNSIPSQGADGVLVPGGFGDRGVQGKILAAKYARENNVPYLGICLGMQIAVIEFARSVMKLRGANSTEFDPATTSPCVIFMPEGSKTQMGATMRLGSRRTYFHVSGCKSAKLYGNASSVDERHRHRYEVNPDMVPDFEKAGLQFVGKDESGKRMGIVELPSHKFFIGAQFHPEFKSRPGKPSPLFLGLIAAASGQLEPLLQRSNPTTKACSISKVPKLKLYPTGPVNNPLNSLVNGYYPNEKRRLRFSKPPAPATHGSDIFNEERLPVR

SEQ ID NO: 71001 - protein, 112 aa, Zea Mays
MNAYECNAYVICLHTSKGMKPHRTRPRATYDDKLYRYGRTIGHDKTSDASESCNVYGMLHLSIYFTSFTYNTNLKYYFVYLQIQYKTQIILRLPSDTIQTSNNTSFTFMGVN

SEQ ID NO: 71002 - protein, 103 aa, Zea Mays
MDTSLGRRARPRLSSLFVVVLRRRPTLARRPRRSSPLEHLCPRPRHRLELGAPLSTSLDRLIHRRPELHSLSAPERKKQRGEEADFVVEDQNTFEDDPQDTFE

SEQ ID NO: 71003 - protein, 575 aa, Zea Mays
MVCFFFRSGGNWSTTYAPSPFYMTSKMRSLYLEGYEYSIFDLTRPDRVQIQGRILDGDSPTELLTSYTESTGRPPVLPRWITSGAVVGMQGGTDAVRRVWGQLKDYDVPVSAFWLQDWVGQRKTAIGSQLWWNWELDDAHYNGWNDLVDDLRSHGIRTMAYCNPCLVPVHTLRFVHGSCQRRCPAAPACFNCVLVQMDEKPSAKRHLFEEARKLGILVRDDAGEPYMMPNTAFDVAMLDLTNPAAHAWFKSTVLRGMVDRGVSGWMADFGEGLPLDARLHSGEDSVAAHNRYPELWARVNREIADEWRASRRRAAAESDDIVDDDDGLVFFVRSGFRESSRWAMLFWEGDQMVSWQANDGIKSSVVGLLSGGLSGFPLNHSDAGGYCTVDLPPFLRYRRSEELLMRWMEVNAFTVVLRTHEGNRPGSNCQFYSSGRTLAHFARCAKMYKAWEFYRARLVGEAARTGLPVARHLFLHYPADERVQALTYQQFLVGTEMLVVPVLDKGRTAVTAYFPAGAGAWRHVWSGNEYGTGAGVQGGFEAQVEARIGYPAVFVRAGSSVGERFVSNLRNLTVL

SEQ ID NO: 71004 - protein, 111 aa, Zea Mays
MAGEEGLKVLGLQVSPFVLRVCLALNMKGVSYEYVEEDISNKSELLLKSNPVHKKVPVLIHNGKPICESLVIMQYVDELFAGRPILPTDPYERATARFWAAYADDKRGTAW

SEQ ID NO: 71005 - protein, 222 aa, Zea Mays
MASQCAPPLPPRPRAAAPFLLGHTPPHARPPRCAALTPSVRAAARPCFLASTRVLLRPQSEEAPASCSWSASDPLLCASPASALLVAWRRRHSPAMGCKACDKPKPNYRKGLWSLEEDQKLRDYILLHGHGCWSALPMKAGTNVKIAAIPSSVVVLTSETFDSIVLDEFYAPWCGHCKHLAPIYEKLASVFKQDDSVVIANLDADKHTDLDEKNHRSDSLVV

SEQ ID NO: 71006 - protein, 250 aa, Zea Mays
MGSAHSSVSTTGGEDEEDDEDPSASAVSSAGAQAPPPALSPSPVRVPPASASKVLEQEPEVLPCLAADSPLSPQPSAAGTPRLLAGPGIKVWDPCHVLLPPPPPSPHAGRQVDAAAIEVVVVSHGECAAAMRPDLVGGRWPATALTARGERQARALAVFLRSRGARLAAAYASPLDRARATAALVCRMATAAWFSSASHSTENIIKISSLCWYLSVMFGRTYTRRRRARDVRRAQERAKQLADVEKERGR

SEQ ID NO: 71007 - protein, 233 aa, Zea Mays
MDLCSFEGDSSVAIAEALYEMVKGFVLQHQVILFCLGETFTELPPIYPLVDLPINTRASAADFGGSVPKPGLEVNLVDAVPCRIAFERGKERHFCFLAIAHGTSGWILLLEELPLKRERGIVRVMAPLAGSDPRIDTKHGKWLHLRIRPSSVPFLDTEKHKAKTKKYLVDGRWTLAFRDEQSCKVAESMVIEEMKLQRGAVAEQLKPLVEFDMPEDGMQHPQTSHETPSDDGS

SEQ ID NO: 71008 - protein, 220 aa, Zea Mays
MGNSQASPASASSSRFVMASRAFPKQELDGLRELFASLAAQSRTGGRAISRPVFLEYYQVRGRLGDRLFQLVAKESGGSDGVTFEDLIISKATYGRGTRDEVDEFIYQLCDVTGDGALTRSDLESVLASVHETVFAIKKEAVEVSNNRPFEEFLNSAVFSKDVEGVSGKSMSLSDFRNWCTLLPSLRKFLGNLLMPPDSDQDLKYHCFIILKTSVLIRCF

SEQ ID NO: 71009 - protein, 113 aa, Zea Mays
MGRALQFVLLGEGRILLNNLGNCWGWIEPPASFRLKRRCKRAGQSEFRHGICFCRPCHCQAVPAVSTTPLVLFLSRTAWTHLPVDLSSHSSHSETDHGILFHERAESIFNYPP

SEQ ID NO: 71010 - protein, 619 aa, Zea Mays
MSRALYRGVSGIGGKLAAADEAYAYYDPKEPSENSIGGGFGRGGARKRHLADAAVKVGVLLLVAAALVGSVAWAGTLYAGRGAAARAAAAAAHRGYRRLQEQLVADLLDIGELAGGGARAKEAEVCPPEYEDYVPCYYNVTDAVDVSDLGAGVAISYDRQCTRDGRVTCLVAPPRSYRIPVRWPSGKGFIWKDNVRISGHEFSSGSLFKRMMVEEDQISFPSDAHMADGVEDYAHQIAEMIGLRNEFNFNEAGVRTVLDIECGFGTFGAHLFERDLLTMCIANYEASGSQVQITLERGIPAMIGSFATKQLPYPYLSFDMVHCAKCNIEWYKNDGIFLVEVNRLLRPDGYFVWTSNLNTHRALRDKENQKKWTAIRDFAEGLCWEMLSQQDETIVWKKTNKRDCYNSRKSGPELCGHDPESPYYQPLNPCISGTRSQRWIPIEYRTTWPSQARQNSTELDIHGVHPEVFADDTSSWDSMVRNYWSLLSPLIFSDHPKRPGDEDPQPPFNMLRNVLDMNAHFGGFNAALLKAGKSVWVMNVVPTDAPNYLPLIFDRGFIGVQHDWCDAFPTYPRTYDMVHADGFLSLQKNHKHRCSTLDIFLEVDRILRPECLDMCDSNL

SEQ ID NO: 71011 - protein, 68 aa, Zea Mays
MANISSPVTKLLRLAKYRVVGRREVLESGDMAVLLRNAKAGDKVSARALLHLILDGDEGDASKKACRY

SEQ ID NO: 71012 - protein, 74 aa, Zea Mays
MLEPCHWYPCRGTVRHHARQALVAHANFLRLALILIASSIPPVSVVRHRVVCARPRQDLALRAPHALAALTVSS

SEQ ID NO: 71013 - protein, 846 aa, Zea Mays
MLKRPTITDYQSAVPEQLMKRLRPGGHGIGETTYPTPIPQRAWSMDDLPRTVACSLSHGSNVTSMDFHPTRHTLLLVGSANGEFTLYEIGLRQTLLSKPFKILDTNACSPQFQNAVVKDPPMSINRVTWSPHGELIGVAFTKYLIRVYAYQPPNETRHVLEIVAHSGGVNDIAFSRPNKQLCVVTCGDDKLIKVWNMHGQKLFTFEGHKAPVYSICAHHKQSIQFIFSTSLDGKIKAWLYDNVGSRVDYEAPGKWCTTLLYSADGTRLFSCGTSKEGDSYLVQWNENDGSIKRTYSGFRKRSAGVAGVVQFDIAQNHILAAGEDNKIKFWDVDNNNMLICTDAEGGLPALPRLRFNKEGNLLAVTTVDNGFKILANADGLRNLRALGSRPPFEAFRLQYEDASMKVSGAPVVATISPNIGRMDHLDRNSPAKPSPMLTGGDTASRSIDIKARISEEKSDKAKASELMEVLNPQQCRVATMPETPDQARKVVRLLYTNSGVGLLALGSNAIQRLWKWSRNEQNPSGKATASVVPHHWQPNSGLVMTNDTSDTNPEEAIPCIALSKNDSYVMSACGGKVSLFTMMTFKVLTTFMPPPPASTFLAFHPQDNNIIAIGMEDSTIHIYDVRVDKVKTELKGHQKRITGLAFSTNLGVLVSSGADAQLCVWTNDTWEKKRTVSIQMLAGKAPSGNTRVQFSSDQNHLLVVQETQLAIYDASKMERIYQWIPQDTLSASISHASYSCNSQLVFSAFIDGNIGVFDAENLRLRCRIAQSVINSNPHVHPLVVAAHPHEPNQFAVGLSDGFVKVLEPLESEGKWGTPAPVTNGTPNGKTPASSTTSNPATDQIQR

SEQ ID NO: 71014 - protein, 852 aa, Zea Mays
MSICGYHSPRFSEDITWLPQWLQPYSTPVVGEHRNNSTAVSSLSCQNCAFVGHPSQEHQDCQNATDGYSGFILHLSGDEDTVVSSPVSSNVLPFSLRVSSESAAQPSLAEGSGNPQIPNSGTCNGLSESLCADGEEQEVNAVSQNQFEANDPQVDMPTKVARKEISIQPDTIRHRRHGFNGGKVDVRKLRNVDVNDAIELSIAASEAMVIAEMILDDSQPDKSAAAAIEAALHVKEARKQFYFEEPQHACGSSEGGLDEIDWLAELDESEMVDAYQDVALSLIHIACSSQDHNTGDLKQQNSHPTCPPCDADTHILWDSSSERQNKKWNSQNADSDDHVSDSFPNNQSAGVPPNEPTPCSASVKQAALCKTISCSRNKKTVLQASTQNNAAFHGTLGALATYQNVHKKVAGVAAQTNVGMKKRVKGLFEEENSYISDSISTDRRCPTSRASSMEIVASSRASLYCKAEGLLEENHHPGTEELCCQVVCSSLSQVDPLCSIVPCSISCDEGPSSQAPVCKQSEGHEGPSNQAPSCKKNEGNEGPTCLTPEREHSKKKEEEFMHTKEFPMMQYLDEEAGPSCVPLVKPADSNVPFRRRKYSSLRPFSTIATKSNIFGSTSNSNADVPVCQLERFTPIVLNKNVQRVQAAKEFIENSAGAENLEDFSAVRKQTYYPQDGSEDQIRELQVPREVFPPTENLVVKQHLKRKRVQFSEAKRSSRRTKNNRRILTKSRFSRSDSRTGEMLETREYTDNKEDTFQGVEFLLTGFPKQKEKEIESLIRKSGGYVLSKVSPFPLDKRKNMAEFPSWNPPIVLSPKKVSTAKFLYGCAIDAWILNPIWLFDSLQAGIMLPPGK

SEQ ID NO: 71015 - protein, 304 aa, Zea Mays
MGLGAAMALGDPPADYASIAAVGLFVALMCVGIIVGHLLEENRWMNESITTLFIVLSQDETPFLYSLVFGEGVVNDTTSVVLFNAIQNFDPGNISGAKLLNFISSFLYLFGSSTILGVASGLLSAYTIKKLYFGSPVKSIALSNTILALVLVSRAAFVFPLSFLSNLTKKTPNGKISFRQQVIVWWAGLMRGVVSIALAYNKAFDLMFPRFCGSARHFGRCARHFGRDIIMPNLKSSVTTTASAVEYMDEVLKALPLGIFEALTAFPFSPSPFLLCEAVPQTLYHLISVPTLYHLPGKNTSNLT

SEQ ID NO: 71016 - protein, 337 aa, Zea Mays
MEMRARESVSMSKDLTGEITPFATALHDVFLHSHCSSCFTKLLPQTPCVMSCMTCCSLRYCCSECLRADSVVHVSSGECCFFVDHLKRASPSYVTEGTSDLRAALRLLCVLEIHGLVSPDSINHYSRIGGLSASGIEEALKEGEVIAERILEGSLLMSSARKSRAQTCVIFSDRLKLEKMALWAVIINSVEVQLSEGLALGVAVYGPSFSWFNHSCFPSASYRFVLAPRNEDCASQKSKSSVVPASKGVAADVWHAWQYEDHSTHALCKYGPRVVVRCIKPINKGDEVCITYIDLLQTREARHSDLWSKYKFICSCRRCIASPEPYTDLILNQTETH

SEQ ID NO: 71017 - protein, 193 aa, Zea Mays
MLKEENNRLIRQEQSNAPAPAPCPRCINDAGHLLLEKEVERLKALNQMLQQELQLQGTDGETHRHSSLSDLVYWSIKVSTAYNPLCFYQLSFTRSEFSMAFPYVSTSVNEKLEDSLLSSFAENYNNGFGRNRITYTDTCTGQDLKKYHNMDAINDLVVSGVASRRVNHPSGQTDIIVFCSGGFENPGTAKSKG

SEQ ID NO: 71018 - protein, 512 aa, Zea Mays
MRKKVKPVANHINSYSSVYRKVLLHSKDNGSAIQEVPREKVNFSEELLSSTSFARQLVDQMTLAKAYVILAKEQGNLQLAWELSSQIRNCQRLLSEGAVNGRAITKDEAHPIISRLARLIYKAQDSHYDISTTIVTLKNHALALEERAKAAIVQSAEFGQLAAESFPKNLHCLTVKLTEEWLRNPKHRSHSEENRNSTRLVDNNLYHFCIFSDNVLATSVVVNSTVSNANHPQQLVFHVVTDRIHFGAMSTWFLINDFKGCTVEVRCIDEFSWLNASSSPLVRQLSEAETQGYYYSAGSKNPERETKFHNPKFVSLLNHLRFYIPQILPNLEKVVFLDDDVVVQKDLTQLFSIELHGNVIGAVETCLESFHRYSKYLNFSHPTISSKIDPHTCGWAFGMNIFDLIAWRKANATSLYHYWQEQNSDLLLWRTGILPAGLLTFYGLVEPLDRRWHVLGLGYDVDIDDRLIESAAVVHYNGNMKPWLKLAIRRYKYIWERYVNISHPYVRECMLQ

SEQ ID NO: 71019 - protein, 749 aa, Zea Mays
MGYHHLLLSPSVAQPPRPALLPPPRGRRGSGVGRATAVFASASSTARSPAADDATRRRAVLLVGVSVLPLLRLRDAAAAAARAQLSSVDLVTDIQKADVTQPEEPWEELHQPDEQGQPARNPLAGLLNAIAVIASGVFAGLLGTSQQEKKALQSTISSMETKLVENEAAMSMLRENYEKRILDEQVKLKKEARKFQEEEAFLQDQLASSRRTVTSLTEEVQREKELVEQLNLEIDRLKSSIAEAEEDKHLSEGKLKENMEVLDILYGKVNLLSQEVNGKDEHIRELSSSLSAKEKDYENLNVICNQAKEDLEQANSQIKQVEKDVRTAKDDLKSKASLINSLNEKVQTLYTEKGEVEEKLSALVSQYTYLKSASEERASHDSELLVQKDDMLNQLEEKLSAALSDSSKDRTRIAELNNELVTTRTILDNEVVANKKLSDLVQFTEEALTGSRNEVFKLSEELDAVKRSNQDLMTQISKLTDEASEVRQALANKIEQAESVYATLSDELASVREVLKKSEGELEITSKQLVLVSEAHSDLNKELLDAYKQLESTQSELVKERKINATLNMELEALVKQSVIESEARKTLQVDLDEATRSLNEVNKSTLCLSKQLETTNSKISAIKEEKDMLSKFLEEQKKSTVEAQENMEDAQNTIKRLGTERESFEVRSKKLEEELATAKGEILRLRRHISTGGSPNTQVLSEAGAAPISSRALKQQPMNDHVQNINGADAVASRSPKRIYRRKRKPAA

SEQ ID NO: 71020 - protein, 86 aa, Zea Mays
MSRSVGHRSSCSRPGDCISTEFHILLHLGCSRGVVMPFARHMRSPRCCECSLLRSTAASLPWKQSSIYCATALASFLIKLGPMVPL

SEQ ID NO: 71021 - protein, 344 aa, Zea Mays
MSRSPCSNASRCAAVGGAAPSRTGSPFAAAGYSALHPGTPATPTPSSAAGYSALHPGVPAPRPPATRSGAPSSVLPPAPVSGAMKIAVEGCMHGELDIVYDTLRRLEEAEGVKIDLLLCCGDFQAVRNENDLQCVSVPQKYRTMNTFWKYYSGEAVAPYPTIFIGGNHEASNYLWELYYGGWAAPNIYFLGFAGVVKFGNIRIGGLSGIHNKHHYHLGHYERPPYNKDTIRSVYHVRHYDVLKLMHLKEPLDVFLSHDWPLGITEYGNWQKLISVKKNFEDEVNNRTLGSKPAAELLNKLKPPYWFSAHLHCKFPAVIQHGKNGPTTKFLALDKCIPGRNFLQG

SEQ ID NO: 71022 - protein, 1229 aa, Zea Mays
MRGRDVPKQELDNRSLLCMEFLSRTSSSDAPLVAFGSSDGVIRVLSMLTWKLVRRYTGGHKGAIACLMTYMSAAGEVHLVSGGSDGLLILWSADHIHDSRELVPKISMKAHDGGVVAVELSRVMGSAPQLITIGADKTLAIWDTVTFKEIRRIKPVPKLACHSVASWCHPRAPNLDILTCVKDSHIWAIEHPTYSALTRPLCELSSLVPPQVLALHKKLRVYCMVAHPLQPHLVATGTNIGIILSEFDPRALPAIAPLPTPTGNKEHSAVYIVERELKLLNFQLSNTANPSLGNAGVASDAGRSMNNSIEQLIVKQTKKHISTPAPHDSYSVLSVSSSGKYVAIVWPDIPSFAVYKANDWSVVDSGTGKLFAWDTCRDRYALVESALAPRMPLVVKGGSSKKAKEAAAAAAQAAAAAASAASAATVQVRILLDDGTAHVLQRSIDGRNEPVIGLHGGALLGVTYRTSRRISPLTATAISTVQSMPLSGFGGSGSSFASDDPFSSKEGPPQNFQLYSWETYQPVSGLLAQPEWTVWDQTVEYCAFAYQQYIVISSLRPQFRYLGDVSIPFATGAVWHRRQLFVSTPTTIECVFVDAGVAAIDIETKRIKQEMKAREAQSRAAEEHGDLALITVEAPQVTVSEKVSLRPPMLQVVRLASFQYAPSIPPFIVPKQSKFDGDDSVFQKELDDRRYAEVAVAGGGVSVAVTRFPPEQKRPIGPLVVVGVRDGVLWLVDRYMCAHALSLSHPGIRCRCLAAYGDPVSAVKWATRLGREHHDDLAQFMLGMGYATEALHLPGISKRLEFDLAMQSNDLKRALACLLTMSNSRDVGQETAAADATDVTQILSLAVAKQAKQESLTDAVQGIVKFVKEFFDLIDAADATGQSDIAREVLKRLAAAASVKGALHGQMLRGLALRLGNHGELTRLSGLVSNLITAGHGREAAFAAAVLGDNALMEKAWQDTGMLAEAVLHAQAHGRPSLRNLVITWNKMLQKELDHTPTVKTDAAAAFLASLEDPKLTSLGETEKKPPIEILPPGMPPLSAPPIVIKKAGAKPGLPNAAKASNGPIGAPMAQGAPMAHGTPGPQGVPMNQVTPSQGSHDEARPSDATVADAAAAVAEGTAAPPAAEGTSAPPAAEGTATPSSEEAKAAPGNEEGTSNPINEEATAAAVSVAAGSPDSAAAPAADTSSDAPAVNPTEDTVSAPSTEAPPELTDKPSSAEASLPPPPSVSGV

SEQ ID NO: 71023 - protein, 190 aa, Zea Mays
MPRWRTGAWKTGARSRASSRDVSRKSWAPRESRRGGARQGATAMGKTSVGSRLDGARSRSKHQRRARRGGYQRNPWRRPGRGAVGVVTRWSRERRTAGQHGRAGDGRWREQGRSKGRAWRPWRATGGWPSWSRRAQGGARERGELGTRRSVELGAERQQGGDGTARRGASGRAVWGRQSARREYQGEGER

SEQ ID NO: 71024 - protein, 50 aa, Zea Mays
MLSLYRVPLEERTRYSFRTESSRNPSSEKLNRQSDLRTSLHLHSSTLLAP

SEQ ID NO: 71025 - protein, 290 aa, Zea Mays
MASARSTCTTGFSSGTQLRLVLHVCAGVRVPGADTAAGVHGEADGEPVADLRAPLGGAHGLQWPHQGIPRLPQLPCTDHVQVNQGSTGDGDGSLHPWSEAQVRVPRVRVGRDARRRPHTLHARGRADVAQLQHGRRGHGVRGARHGCFPWQPARSNLQDEPGHDSDGDAVLLHCRWPSVPSGAHGVNRRARDGLDFLLPASVRVRGAGVGGDGHVRRPGLRALPHRAFRCSNHSHGDDGEEGGDAAAVVPDIHQAPHGAARDGAPPHNHGHRHQAPAGEQGETPAPAAQE

SEQ ID NO: 71026 - protein, 136 aa, Zea Mays
MYVCHHPIPIPPITLSLYSNHSAESYLTQPSSSSPGSPPAMSAAFKAFLNSPVGPKTTHFWGPVSNWGIILASVADTKKPPEMISGNMTGVLCVYSALFVRFAWMVRPRNYFLMVTHSCNECVQLYQLSRWARAQG

SEQ ID NO: 71027 - protein, 92 aa, Zea Mays
MLPDPRQALATQRAPNPTQPRHRPCPSLHSTRLEPRQPSTVKRATDRHPDPRRAPARHPGFPASTQQRPAHPQELAAKLVVKEILIMWRCRG

SEQ ID NO: 71028 - protein, 92 aa, Zea Mays
MALIAHLGKSNAMAWYITVAVSTCCTWMALPARVIRSAFQLGKRSASLSISGCSCSLLSFLRERGSPRYLRGSVSTLQGKIWVTISMSTGEQ

SEQ ID NO: 71029 - protein, 255 aa, Zea Mays
MSMTWICDTITEFGFGHGSSLIICVGILTGYTDTLHKMITQFSGNFSYCWPYILGVAGIFMILTMGAVLVTEGCRKIKLQYYGFKLASGAGNESSPVTEVEPYIPFNINPTGMQPLLTTSYLLAFPSIMASIFASPFWENLREILNPKTSTGGSPWVYYLTYAFLVFIFNIFDIANLPKEISDYLNKMCARVPRIKPGRATVDYLTKIQTSTRFWGGLLLSLLATSSLLLDRYLRQINEGWAQLLSLEDHIKRTM

SEQ ID NO: 71030 - protein, 103 aa, Zea Mays
MTAPKPGGGAVAAARAAAAGPRTVLITGVSRGLGQALALELARRGHAVVGCGRSAEQLRSLEVEITSPSRHFLTVADVPVELIIVSDYGLEHSVHELLEHSPH

SEQ ID NO: 71031 - protein, 121 aa, Zea Mays
MSGTRPTGKLRARHGRAGDGRRARARSNEWTPGRAHREFWLGASTGIELEGEHHGKQRSSTASSSTQNSSRGRRQIRGREREAGREPSRKSMEGRPAHHRTSPHGRTANMLTTTARPAPLA

SEQ ID NO: 71032 - protein, 1446 aa, Zea Mays
MEDDSRRVDTMQMGSNLDGSLLRRSSSWWASRGNNAFWWPAREDDDEEALRWAAIEKLPTYDRMRKGILTAVGDGIQEVDIQGLNMQERKCLIQRLIRIPEEDNERFLLKLCERMERVGIQNPTIEVRFEHLTIDTEIYVGKQGVPTFTNFFSNKVRDALIALHIISSGKRPICILHGISGIVRPNRMSLLLGAPGSGKTSLLLALAGKLDSTLKMSGRVTYNGHAMDEFVPQSTSAYIGQHDVHIGEMTVRETLAFAARCQGVGTRYDMLTELSRREKHAKIKPDPDIDVYMKAISQEGQENFITDYVLKILGLDICADIMVGDSMIRGISGGQKKRVTIGEMLVGPANTLFMDEISNGLDSATAYQIVNSLRQSVHILGATALISLLQPAPEIYELFDDIVLLAEGQIVYQGPRENVLEFFEAMGFRCPDRKGVADFLQEVTSRKDQYQYWCTRDEPYRYISVNDFVDSFKAFHVGHALQSELELPFDRTKNHPAALTTSKFGISKMELLKACFCREWLMMKRNSFVYIIKIVQLIILGTITMTVFLHTKMHRHSVEDGVIFLGAMFLGLVTHLFNGFAEVAMSIAKLPIFYKQRDNLFYPSWAYALPTWLIKIPISFLECAVWTGMTYYVIGFDPSIERFFRHYLLLVLISQMASGLFRLLAAVGREMVVADTFGSFAQIVLLILGGFLIARNNIKKSWIWGYWSSPLMYAQNAIAVNEFLGNSWQVDRAENNDTLGVQILKARGIFVGPKWYWIGVGALLGYIMIFNLLFVLFLDWLGPLRKGQTVVSEEELREKHVNRTGENVELALLGTDCQNSPSDGSGEISRADTKNKKGMVLPFTPLSITFNNIKYSVDMPQEMKDKDITEDRLLLLKGVSGAFRPGTLTALMGVSGAGKTTLLDVLAGRKTSGYIEGDIYISGYPKKQETFARIAGYCEQSDIHSPHVTVYESLLFSAWLRLPPEVDLEARKMHVEDVAELVELIPLRGALVGLPGVNGLSTEQRKRLTIAVELVANPSIIFMDEPTSGLDATAAAIVMRTVRNTVDTGRTVVCTIHQPSIDIFEAFDELFLLKWGGEEIYVGPLGHKSCHLIKYFEGLQGVKKIKDGCNPATWMLEVTTVAQEAILGCNFAEVYRNSYLYRKNKILVSELSTPPPGSKDLYFPTQYSQSFITQCMACLWKQHKSYWRNPSYTANRIFFTALIAFVFGTIFLSLGKKVGKRQDLFDALGSMYAAVLLIGVQNGLTVQPIVDVERTVFYREKAAGMYSALPYAFAQVVIEIPHIFLQTVVYGLIIYTLIGFDWTVQKFFWYMFFMYFTFMYFTFYGMMAVAMTPNSDIAALASTAFYAIWNIFAGFIIPRPRIPIWWRWYSWACPVAWTLYGLVASQFGDITDVKLEDGEIVKDFIDRFFGFTHDHLGYAATAVVGFTVLFSFMFAFSIKVFNFQIR

SEQ ID NO: 71033 - protein, 600 aa, Zea Mays
MTDNLVSSMETAALADEDASPKKTKQGGFRTMPFILANEICDRFATAGFNANMITYLTQQLHLPLVEASNLLTNFNGTAAFTPVLGAIIADSRAGRFWTIAGGGVLYQLGMLGLVVSALVPALRPASCGATGAAPPLTCQRANGGQLAMLYGSLLLTALGGGGIRPCVVAFGADQFGQRGKRPGGEQQWSYFNLYFFSMGLAVLLALTVVVYIQENVGWGWGFGIPAIAMFVSVLSFVVGYPLYVKVKPQGSPFKRLLQVVVAAFKKGKDSVPEDVGLLYQNKQLDAPVAADGRLLHTDQLRFLDRAAVLTTGDLSDSGEPNLWRVSTVHRVEELKSIVRMLPLWAASITAIAAASHNFTFAIQQARTMDRHLTPRFQIPPATMIIFTTLTMLVSLALYDRVFVPVARRYTGRRSGGITYFQRMGAGFAVSVLGVLAGALVEARRRRVAAEHGLLDSPSAVVPVSVFWLVPQYALHGVSDALSTVGHMEFLYDQSPESMRSSAAALFWVAGSLGNYLGTVLVTVVQSATRGVWLQDNINKGRLDYYYWLVTFLLVLNLFYYIACFHFYTLKTFEVDAGRTNGGERQPEAAEPCHVQVGSL

SEQ ID NO: 71034 - protein, 77 aa, Zea Mays
MPQVGMKTVSEFFGIPKTVFDFFRSNSPVTVLFGNRIGIGIFVSETVSKSVCHFTDRFVWLPILIGIYRFFLGILPK

SEQ ID NO: 71035 - protein, 188 aa, Zea Mays
MQLVKQCWSRPHRRAAREGNSSTLMQSGPTIAILGLHLHLHLPNIRCWSSATCCLRALADRLALRSRDHAGAAALQLYLTGFRVLRPSRADLHSSLDRRRMHAFLSSRSDLSVPRCRAVSVIPSSSSSVPCVTANSSSVLALVSSPSFYGFGVVEFHLAVTTSWSFGASANCCPAALSCGAPYSLVPT

SEQ ID NO: 71036 - protein, 171 aa, Zea Mays
MVVPITAGILSALRRVLARRVSLKNQLKRRLHAITIASATCFLFPFAMWDTILGSASDSIVKFQLPNWAYLSTVLFGMVLIFYVDNVTEEKLHLVFSSPRHLMVSTGCIIVLEIVYQMDFSLFGFLVCSVILGLGIFETTSLERSKKSPLETHELSNGVFHNQLPITELPS

SEQ ID NO: 71037 - protein, 253 aa, Zea Mays
MYEAYSDYESMMNMAEEIVTRCAMATHGKLKVDYEGTEISLERPWRRETMHSLVKEATGIDFNSFGQDVESAKRAVRGLPGFVVGNSESTSLQACSSVGHVLNEVFETFVESTLVQPTFVLDYPVEISPLAKPHRSHVGLTERFELFICGREIGNAFSELTDPIDQRSRFENQIKQHNAKRAAMAKEVKSTEGEGDDDYSYEVSLDEDFLTSLEYGMPPASGMGLGIDRLVMLLTNSSSIRDVIAFPVLKIQQ

SEQ ID NO: 71038 - protein, 288 aa, Zea Mays
MPNKKLSASAPPFNPSPPSVLSPLSGNVGLPPPGAIPGVAPWPVNVSLHPGHSTMVPSGPPLCTSPHHLYPPAPRSPNLMHPVPFIYPPYSQPQVVPNTTFPMNTNIFRPNHYGWQPYMGPAPSEFVPMSAWSSSHTIDFIPTPHVVDPISQSLADKHIQSDAAVVSIGPSLDSSAVVAKEEMETPAVAVSGNLISNKHDDQDKQLKDATRIELSPEMQEDNKHDEGSFRIYVKGKSRRKQTLRIPISLLNKTYGSRSFKLVYNKVVRENDIFRPSSVSFAEVVSSGN

SEQ ID NO: 71039 - protein, 364 aa, Zea Mays
MLAASLRPGPSLAAFPGTAQRSPVPFLPFPARLHHRPVLLSATAEGTGAPAGQGDASAAPLDEVRLPQFAADWESARACKDQGRIFSLPVLRANSGGLIVRFNSLQGFVPNPLLSPAHWCKDPKRPIQDVTKDLVGTSISVKVAEVNEEEKKLVFSEKDASWSTYSSRIKIGDIYDGIVGSVFHYGAFVHLRFPDGLYHLTGLVHISEVSWDLVQDVKDFLNEGDAVKVIVVNIDMTKSRIALSIRQLEEDPLLETLDKVIPLEADQSPNRMMSPSEVELLPGLDGICNELLQEDGITDVQFGRQALEKRVVSQDLELWISNVQAKDNRFTLLARAGRQEVYLTTSLDQEGIKKAVQRVLGRVP

SEQ ID NO: 71040 - protein, 540 aa, Zea Mays
MATAMSVSAVSPPAAAVTRPRTMVCVPATARAPREMAAELAAAAALGADVAELRLDCLAGFAPRRDLPVILAKPRPLPALVTYRPKWEGGEYEGDDESRFEALLLAMELGAEYVDVELKVADKFMKLISGRKPDNCKLIVSSHNYETTPSSEELANLVAQIQATGADIVKIATTATEIVDVAKMFQILVHCQVPIIGLVMNDRGFISRVLCPKYGGFLTFGSLKKGKESAPAQPTAADLINLYNIRQIGPDTKVFGIIGKPVGHSKSPILHNEAFRSVGFNAVYVPFLVDDLAKFLDTYSSPDFAGFSCTIPHKEAAVRCCDEVDPVARDIGAVNTIVRRPDGKLVGYNTDYVGAISAIEDGIKASESEPTDPDKSPLAGRLFVVIGAGGAGKALAYGAKEKGARVVIANRTFARAQELANLIGGPALTLADLENYHPEEGMILANTTAIGMHPNVNETPLSKQALRSYAVVFDAVYTPKETRLLREAAECGATVVSGLEMFIRQAMGQFEHFTGMPVDDYKFRAIASSLDNPNTMKPRL

SEQ ID NO: 71041 - protein, 358 aa, Zea Mays
MPPPSSSRYSPGRLLAARPASATTVGRWARLSCSLSMNGCAPGAGDRGAVCVRETRALPAAPAPHDAVGRLRAAVDALWSNAAPPAAPSGIIRIEVPITQRVDAVEWLHAQTTLPRCFFSARAPLPDAPALAGNGNGNGSVHRQQPVSVAGVGSAVFFRGTEPFSLADWRAIKRFLPRDCPLVRAYGAIRFDATSDASVEWEDYGSFYFVVPQVEFNELEESSVLATTIAWDDSLSWTWHNAVEELQSTLRKISPCSSVQANKASLQTAIVSLNHVPTKASWDLAVTKALHMIKGRQRELVKVVLARCSRYITDTCIDPVELLACLKAEGQNAYQFCIQPPGAPAFVGNSSNYFIGST

SEQ ID NO: 71042 - protein, 129 aa, Zea Mays
MALAQHATLDVWSYPDSWCSYANPILERSHIFIDMLNCYILPSSQNSICFSSCFLSIFKWMVMNLDTYIKYIHQVLYESNNYLKRILIWDRGSSFLFQDINDVRLRKGKRLICSIVAYHDNSFILNRKI

SEQ ID NO: 71043 - protein, 134 aa, Zea Mays
MRNFSGLYHLSFACGQEVDGSRRSLEGRNRGLCLVFFGEERRAKKWEACSCRITKPFQILCKLPTPDLSLFTKTTTKTSICLTPDVHFLCSPRQCFPHSSWSAVIRSEASDFIFLFNIGYTDPSVIWFLFSCSQ

SEQ ID NO: 71044 - protein, 56 aa, Zea Mays
MAFILIYTYIWLCLENEEEIEVTEEKTQPPSDSQAGNCFYFDICGSETDSPINKGK

SEQ ID NO: 71045 - protein, 216 aa, Zea Mays
MGAKRAVLVGINYQGTKAELKGCHNDVARMRRCLVDRFGFDESGIRVLIDDGSAPQPTGANIRRELARLVGDARPGDLLFFHYSGHGIRLPAETGKDDDTGYDECIVPCDMNLITVEGYLTRPRSRLGTAPSRSRSRPRPRPRAGNLRNGLLLAPASGNSSKVLFGKRLSLKEFTCPTVAVATSKGAVTATTVTKSRATSTQPMPTSKTGRYLSRH

SEQ ID NO: 71046 - protein, 182 aa, Zea Mays
MLHFSGVFSLSLSRELTDGSFISSRVHPPATRHSYPPASALRHRYLYSSSFLPPFPPHAFVFVVLQPRNRASYFIVPLTSFVRSFFRVICLGVGGNGGLRPVRARQGAGGGHRLPVRVVRGAFHVLVVGRGGPRRRRQLVRVHLPLRDGLPHDAPPDQEGPVQVLRRQVAVVRVAGGGGRHR

SEQ ID NO: 71047 - protein, 347 aa, Zea Mays
MTTMSDDGDRTCPLCAEEMDITDQQLKPCKCGYDICVWCWHHIIDMAEKEETVGRCPACRTCYDKDRIVKMAATCDRTVAEKNAEKKHRTQKVKPKAAPSAAATSTVESKKHLASVRVIQRNLVYIIGLPAHLCNESVLECREYFGQYGKILKVSVSRPTGPPSQQASANSNISVYITYAKEEEAIRCIQAVHNFVLEGKVLRACFGTTKYCHAWLRNMTCGNPDCLYLHDVGSQEDSFTKDEIISAYTRTRVPQMASGVSQRRTGTVLPPPGDDFSYSAVVSAKHTFKNGTLNTTSQPRLSPPNSSSGRSTLPSAASWYDTSKSLLLPFFHALISPPPHFYLQGAA

SEQ ID NO: 71048 - protein, 144 aa, Zea Mays
MAAQEGGMRLVSHPIAAHDGRLPRQYTAEGQGAKKDMSPPLEWYGVPEGARSLALLVQDIDADPIVPWTHWVVANIPPATRGLPEGFSGAAGAGPGRDQLGGLQEGVNDWKQPGWRGPVPPSHGHRIQFKLYALDDEVHLGNKG

SEQ ID NO: 71049 - protein, 463 aa, Zea Mays
MMVIPFFQHASTSGETPLPGKMNPRIDRSGSNETSKVPRLGSIVGTASMAGFGKAVEILDTLGCLMTTLSSDGGFVSRTKTKGCKISILAFEVANTILKGASIMQSLSEDTVTYFKQVVLPSEGVQNLVSSEMSELMRIAANDKREELKIFSQEIVRFGNRCKDPQWHNLDRYFVKLESENAPQKQLKETSIAEMQKLMSLVQRTTDLYHELHALDRFEQEYFSRINGKGHTDRIEKGGNIQIVKLELKTQSSYVKSLKKRSLWSKTLEEVVEKFVDIMHYLHVEINNDFGSSDGGVMNAESTESCQRLGPAGLALHYANIIIQIYSIVSRSGYVPSNSRDALYQGLPPRIKSALPNKLRTTSVPQELTIDQIRARMEKTLKWLIPMAVNTTCARGFLRFSEWAKSGTERVGRRPGVADRIETLYHADKARTEDCILELLVWLHHLVSQSNRLAMQKVTDQCI

SEQ ID NO: 71050 - protein, 348 aa, Zea Mays
MAAAAVASSSTPRPLRLAQRGAVSAHASHHVSAPPHRSRRPRLSVSASAGVEGTSGSERFYFNFTGFPFPLGPFLNRRTIRTEAVKGSIWLFEQEQALGFSSVSTNIRMTVIKLKSGGLWVHAPIAPTKECIQMLKELDAPVEHIVLPTFAYEHKIFVGPFSRKFPKAQIWVAPRQWSWPINLPLEFFGIFRAKPLKDEDDATPWVAEIEQKVLSSPEVGIGPYVEVAFYHKPSRTLLVTDAVIFVPQQPPECISKESLLASAKNGLAVKLLSKGKEVPDEPVVDNKLNRQKGWERMVLQILFLGPSNLLEPNASFAQMSQKLIVSPIVKTLVFSKVPEKAAVQCAQD

SEQ ID NO: 71051 - protein, 169 aa, Zea Mays
MQRRRERRTHDEEAKEVAHQKKQGLQTLKEPALYEQLGSSMPSQPACGGCRKVGATRPRRSTFSAGYAPCQEEDGPFDDEVKPPSSDAPLITGLHMHLATISRGPNEPQVDFPLKGVDSLQRLRFTNPTLTSRHPGFQDPRFWNLFQVDFYNSVIMSKKHRVVRHRFID

SEQ ID NO: 71052 - protein, 719 aa, Zea Mays
MKDVRLGECGLSYAVVSIMGPQSSGHRLPKDDTAFEKQSALFALAVSDIVLINMWCHDIGREQAANKPLLKTVFQATFEVMMRLFSPRKTTLLFVIRDKSRTPLENLEPILREDIQKIWDAVPKPHAHKETPISEFFDVQVVALSSYEEKEELFKQQVSDLRDRFQHSIAPGGLAGDRRGVVPASGFSFSSQQFWKVIKENKDLDLPAHKVMVATVRCEEIGNEKVTSFIADEEWQQFEEAVQHDFVTGFGKKLSSLLDRCLSEYDMEAIYFDEGVRSSKRQQLESKLLQLVNPAYQSLLGHLHTRTLEAFKEYFGKALEKEGFAVAACNCTETFLEKFDRGSEDAAIQQVNWDTSKVRDKLRRDIEAHVASVRAAKLSELCAKYEAQLTKALVEPVESLLDSASEDTWPAIRKLLQRETKTAVLGLESAVSAFELDEATEKELLAKLEKHGRSVVESKAKEEAGRVLIRMKDRFSTLFSRDADSMPRSVKLLSTMAAIRLEEDGDNIENTLSLALVDTSRHGTTDRSIQLSDPLASSSWERVAEEKTLITPVQCKNLWRQFKAETEYTVTQAIAAQEANKRNNNWLPPPWALAAMAILGFNEFMTLLRNPLYLFAIFVIYLVGKALWVQSEIGREFQHGFLPAILSLSTKFVPTVMNILKRLADAGQEPAAAPERQREMELQPKSTRNGSLYSNVTSAGSSSVTTSEIGPEYSSPVVQ

SEQ ID NO: 71053 - protein, 132 aa, Zea Mays
MEKSRVLVVGGTGYIGRRLVRASLAQGHPTLVLLRPEIGLDIDKLQMLLSFKAQGARLVEASLEDHAGLVAAVAQADVVVSAMSGAHIRSHNLSLQHKLVEAIKEAGNIKLYSVMKTMLQRIQSSLLMILAH

SEQ ID NO: 71054 - protein, 238 aa, Zea Mays
MSRHRVETCDSWRPPRKNHAGAPPLLRAGPRLLAFASLSVRDGGDSAAAVAKAVEEAVVVRSDEVKEAVAGEERKKTKSTERRLPPAAQLVSHPLALLALVPNSAAIFAAGAAAGTVAKTVTAPLDRVKILMQTHSVRVAGESAKKGVGFLEAMADIGKKDGLKGYWKGNLPQVIRIIPYSAVQLFSYEVYKKIFRRKDGELSVFGRLAAGACAGNLPTGCSPAQASSSIWTQHFISG

SEQ ID NO: 71055 - protein, 336 aa, Zea Mays
MVAAAGRRRRRCAAAILLVLPVVAVLASSSAAADGSFITWDDLSTPSAAAVQGGVKAASGGGARELDTIVVAQDGTGHSRTVQGAVDMVPAGNSRRVKILVRPGVYREKVTVPITKPFVSLIGMGSGRTVITWNARASDMDRSGHQVGTFYSASVAVEADYFCASHITFENSAPAAPPGAVGQQAVALRLSGDKTMLYRCRILGTQDTLFDNIGRHFLYNCDIQGSIDFIFGNARSLYQDGAVRGVQLQGPRGEHEEPGALVPLAHLRRGAAVPRPELHQRRAVAQAVDPIRPPGCRAELRRRRAMVPPSELCVGHATSLVFFGAYSVTSKQLVRL

SEQ ID NO: 71056 - protein, 237 aa, Zea Mays
MRSIFSGVVHLQMNCAHLENCLHEAREEARTNKCSPDRRAVEYDALRSSALRIHGLFERLNNCITAPGVTGFAESLHSLAASLASYVKKDEADTTVQFQQCIKILADKAVHGGITKELDEKKELIKNLYNKLQQEKQEPKTIILTSSDAHQSEQPRHAYLAFSRTIQEVWCIKRISVVPHVENLQRLTCWAPKLQCSSIPQSKFTMPTNHSLLLRFTIPICTKMPQGCCPRVSCSDC

SEQ ID NO: 71057 - protein, 128 aa, Zea Mays
MLLRRQVPCTGCTFNSSSISCPQVMYSFLFKSSTAFYLTRFQFLAGTLSLLPSSTIMLQSRPSVSILRLLDHYRTCNLMAAIVASYSSFGFKVIGLFSICICREWRARTRSEIVDILGLGVWDEWDYV

SEQ ID NO: 71058 - protein, 66 aa, Zea Mays
MKSEQRCARMDSTANGGHGRDARSEQRSAHGREEIRAGAGASSPGSRGNPSARRKKQLGGRAPCGT

SEQ ID NO: 71059 - protein, 192 aa, Zea Mays
MAKSLEQRLHHSSPWRFHACVQRNRRIHVGAPRRAWPGARHLHRPPRPGRPRLTHERGAPPCRGLHPLLRALAQVPPRYHHFRALRAGHPPVVKSLAHHSILGRTCCEDDEVFHTSAPKCSTECLIQDIDLLKPISVAPMSTLVPATPRAAVELANSVFTSITFFPDSLHGHHLCSLCFMVRLSKNTYGEWK

SEQ ID NO: 71060 - protein, 63 aa, Zea Mays
MGERFKWNDQKLLKERIVLVDCTGLLVNIISRTGEPLSAYIQSLSEVRIFHYVVASVPHTPVA

SEQ ID NO: 71061 - protein, 133 aa, Zea Mays
MARRSNPARRVRPRLTASADGAPGCRLGLDGRTPRSRTTQSTLRRCEAGFAIAGVAGRQIDAGHGGAPATCARGARQPRRETSPPPGPMATRAVASCVSPAPHAFRFVSFRFHESAATRPERRAAGRGNRRSP

SEQ ID NO: 71062 - protein, 69 aa, Zea Mays
MMCFQPALSTRERRINYSHVALINMFVICPSCWPHVSTAVTRISLNKILHQMPKAFSSIDFWKHITHCI

SEQ ID NO: 71063 - protein, 117 aa, Zea Mays
MESPPLTAEAIAYTEKKMDMALEDIIKMSKKKNPGGKKPPRQPIKKHPFQNGNSNKGNGKVQSFMESRSTIRQGVLAQRRSNLGGNQFPATKQAAKKAAVMPMHKGAIRWNKPSFMV

SEQ ID NO: 71064 - protein, 107 aa, Zea Mays
MLHAHASACFLRASFCTPGSSPSSSSSIATQPSSLSLWCRAPAARSSFSSQPPKLSARVTYQHQNLRSRAPLPGALHLHLSRSIHYIQSWGLQEFKPVPVGTAAVRS

SEQ ID NO: 71065 - protein, 759 aa, Zea Mays
MAFAVSGAVLGGAVRAPRLTGGGEGSLVFRHTGLFLTRGARVGCSGTHGAMRAAAAARKAVMVPEGENDGLASRADSAQFQSDELEVPDISEETTCGAGVADAQALNRVRVVPPPSDGQKIFQIDPMLQGYKYHLEYRYSLYRRIRSDIDEHEGGLEAFSRSYEKFGFNRSAEGITYREWAPGAFSAALVGDFNNWDPNADRMSKNEFGVWEIFLPNNADGTSPIPHGSRVKVRMDTPSGIKDSIPAWIKYSVQAPGEIPYDGIYYDPPEEVKYVFRHAQPKRPKSLRIYETHVGMSSPEPKINTYVNFRDEVLPRIKKLGYNAVQIMAIQEHSYYGSFGHASSNTLDGLNGFDGTDTHYFHSGPRGHHWMWDSRLFNYGNWEVLRFLLSNARWWLEEYKFDGFRFDGVTSMMYTHHGLQVTFTGNFNEYFGFATDVDAVVYLMLVNDLIHGLYPEAVTIGEDVSGMPTFALPVHDGGVGFDYRMHMAVADKWIDLLKQSDETWKMGDIVHTLTNRRWLEKCVTYAESHDQALVGDKTIAFWLMDKDMYDFMALDRPSTPTIDRGIALHKMIRLITMGLGGEGYLNFMGNEFGHPEWIDFPRGPQRLPSGKFIPGNNNSYDKCRRRFDLGDADYLRYHGMQEFDQAMQHLEQKYEFMTSDHQYISRKHEEDKVIVFEKGDLVFVFNFHCNNSYFDYRIGCRKPGVYKVVLDSDAGLFGGFSRIHHAAEHFTADCSHDNRPYSFSVYTPSRTCVVYAPVE

SEQ ID NO: 71066 - protein, 751 aa, Zea Mays
MDLAINPFSSGTRLRDMIRAIRACKTAAEERAVVRRECAAIRAAISEGDQDYRHRNMAKLMFIHMLGYPTHFGQMECLKLIAAAGFPEKRIGYLGLMLLLDERQEVLMLVTNSLKQDLNHSNQFIVGLALCALGNICSAEMARDLAPEVERLLQNRDPNTKKKEKHHGVLISAVQLCMELCNASNEALEYLRKVSTKTESNKNAGNAILYECVETIMSIEATSGLRVLAINILGRFLSNRDNNIRYVALNMLMKAIAVDTQAVQRHRATILECVKELVDYLEVSDQDFKEDLTAKICSIVEKFSLDRLWYLDQMFRVLSLAGNHVKDDVWHALIVLVSNASELQGYSVRSLYKALQASSEQESLVRVAVWCIGEYGEMLVNNLSMLDMEEPITVTEYDAVDAVEAALQRYSADVTTRAMCLVSLLKLSSRFPPTSERIKEIVAQNKGNTVLELQQRSIEFSSIIQRHQSMKSSLLERMPVLDEANYLVKRAASIQAAVPSVNSAPAVTSGGPFKLPNGVGKPAAPLADLLDLSSDDAPVTTSAPTTAPNDFLQDLLGIGLTDSSPIGGAPSTSTDILMDLLSIGSSSVQNGPPTANFSLPGIETKSVAVTPQVVDLLDGLSSGTSLPDENATYPTITAFQSATLRITFSFKKQPGKPQETTISASFTNLATTTFTDFVFQAAVPKFIQLRLDPASSSTLPASGNGSVTQSLSVTNNQHGQKPLAMRIRMSYKVNGEDRLEQGQISNFPAGL

SEQ ID NO: 71067 - protein, 333 aa, Zea Mays
MERYELLKDIGSGNFGVARLMRNKDTKELVAMKYIPRGLKIDENVAREIINHRSLRHPNIIRFKEVVLTPTHLAIVMEYAAGGELFDRICSAGRFSEDEARYFFQQLICGVSYCHFMQICHRDLKLENTLLDGSPAPRLKICDFGYSKMADVWSCGVTLYVMLVGAYPFEDPDDPKNFRKTIGRIVSIQYQIPEYVHISQDCRQLLARIFVANPAKRITIREIRNHPWFLKNLPRELTEAAQAKYYKKDNGAPTFSDQTVEEIMKIVEEARTPPQSPAPVAGFGWAEEEEQEDGKKPEDDEQDGEDEQYDGEDEYDKQVKQVHASGDFRHLIK

SEQ ID NO: 71068 - protein, 111 aa, Zea Mays
MASPAGANSGDEPGTIPRDVRVENGHGVVGRRDGGPASSYWDLLRAHLSDPLTGVLMDDALILSCGHSYGSSGMQHVYRMKACGKCGMPITEAAIRPNLGTRGQYISWIQV

SEQ ID NO: 71069 - protein, 465 aa, Zea Mays
MSKAPDDHLQATEQEGSVHPSQQAGQQHVNAAYQFSKTELTEGSKNEQPVQVEQLSSHLQQAYPEIQLQQAETDSFQLAEKETGYFGQQSFAGAKVDVAQPSVVQQNVKQTVGQQASSGTQDTRKGPSIPFNMLIPILQAHLDRDKDMQLQTVWAKLRRNEVNKDDFLRVTVNIVGDQMLKQAAHKVFVQMQAQMQRNSQANSSQQSLFSQLSAQQMASSGSAQLHDQKIRPPGPPNQGQKNQVSSSPQAFAPPSGTQPQNSVHYLAHDNPNQNPDAKGTNVVPNQPSRMNTSVPLQTKDKQHQPTQLQQASQQIYGANNPGAQAYPRSITGSLRSPSPVPETQPSMHAPGMAPAKMVPPPTHPMMQHNATAWKMHQNRELKTNAPPPNANMKQNSESVGKVRMAGTGNSSAKGKQGTPNSTPNASGGTKSSKKSGGQKKSLEAAGSMQPSRRNLEPPRNKVSMN

SEQ ID NO: 71070 - protein, 268 aa, Zea Mays
MDHVVGGKFKLGKKIRSGSFGKLYLAVNVQNGEEVAVKLGGSCRREALATGCCTSTANRGHRAGGQKQPATTVGHRRLEEGEEKGELGFILDGFPRTMRQAHQPRQAGFAGDDAPRAVFPSIVGRPRHTGVMVGMGQKDAYVGDEAQSKRGILTLKYPIEHGIVSNWDDMEKIWHHTFYNELRVAPEEHPVLLTEAPLNPKANREKMTQIMFETFNTPAMYVAIQTVLSLYASGRTTDIPWKRRKAWVCSEHMCSQGLPAASWFSERG

SEQ ID NO: 71071 - protein, 280 aa, Zea Mays
MASPDDPVLSACKKNLSHFRIKELKDVLHQLGLSKQGKKQDLVDRVMAVLLSQQDQAFETNGLPKAKSAVKIVEDTFRKMQDPTNTVAVSRSHELGDSVTCKKKPDDSAQAVKVRCPCGDSKPNDSMIKCIDPQCNIWQHVGCVVIPDTEKSADNISPELPSCFYCEVCRLSRADPFWVTVNHLLLPILIGPSTVAADGSYTVQYTAKSFQLSRANREILQQAECNIQVWCILLSDKVPFRMHWPLHSDMQVNGIYVRVVNRQPTQKLGANGRDDGPLIT

SEQ ID NO: 71072 - protein, 1170 aa, Zea Mays
MDDVCEGKDFSFPEQEEGVIELWAKLDAFHEQLRRTEGGEEFVFYDGPPFATGLPHYGHILAGTIKDVVTRHQSMRGRHVSRRFGWDCHGLPVEFEIDKALGITNRQQVFDLGIGKYNETCRSIVTKYVSEWEAMVTRTGRWIDFKNDYKTMDLNFMESVWWVFAQLWEKDLVYRGFKVMPYSTGCKTALSNFEAALDYRTVPDPAVMVSFPIVGDADNAALVAWTTTPWTLPSNLALCVNANLTYAKVKDKSNGAVYVIAESRLGQLPVKAKASGKKQAPSKGSNIEAVQDGLDKESYELLSKIPGVSLVGLKYTPLFDFFIELQGTAFRVIADNYVTDDSGTGVVHCAPAFGEDDHRVCLAAGIFETAGLVVAVDDDGCFIEKISDFKGRYVKEADKDIINAVKDKGRLISKGSIEHSYPFCWRSGTPLIYRAVPSWFVKVEKIKDQLLECNKETYWVPDYVKEKRFHNWLEGARDWAVSRSRFWGTPLPLWISQDGEEIVVMDSIEKLEKLSGVKVTDLHRHYVDDITIPSKRGPEFGVLKRVDDVFDCWFESGSMPYAYIHYPFENRELFEKNFPGNFVAEGLDQTRGWFYTLMVLSTALFGKPAFKNLICNGLVLAEDGKKMSKSKKNYPPPKDLIDEFGADALRLYLVNSPVVRAESLRFKRTGVFAVVKDVFLPWYNAYRFFVQNAKRLEVEGLASFSPMEQVVLLKSSNVLDHWINSATESLVSFVHQEMDAYRLYTVVPYLVKYIDYLTNIYVRLNRKRFKGRTGEEDCRISLSTLYHVLVTTCVVMAPFTPFFTEVLYQNLRKVSSNSEESIHFCKFPSTTGERDERVEQSVKRMVTIIDLARNIRERHNKALKTPLKEMVVVHPDNDFLEDITGKLKEYVMEEINVKNVTPCNDPLMYASLRAEPNFSVLGKRLGKDMGKVSNVVKKMTQEQILAFEKSGEVSFFGHCLKLDDIKVVRQFKRPENVSEKEIDAAGDGDVLVILDLRTDQSLFEAGVAREVVNRIQKLRKTAQLEPADPVDVYYESVGNDKNTLEEILKSQYIRDALGSPIVPKEMAPTDVVVLGEESHNVHDMSFVICIARSTPIISPDLLSHASGNSNHVEALRVYLLSKSLSRLKNQFQSGNGVITVDCIEGYPLIRLQLGKHVFLSAGDFYLASRS

SEQ ID NO: 71073 - protein, 60 aa, Zea Mays
MLLSYAQELKHGVELWQVFYHANVCDRVVSEAAVFSGTNNYNRVTARHKAFSEQSLHTCY

SEQ ID NO: 71074 - protein, 115 aa, Zea Mays
MSGTQSSYHSTYKEEDFYYVTVRPSLLALTCQQTGVPRRDGAVASRGGGRGARRRPCGGGARAVPCVCGRQPKMSSNLPWPLVGHLIPAAGFLLPLVGCLFPASTTSFPPASPLV

SEQ ID NO: 71075 - protein, 464 aa, Zea Mays
MKFLVRTLVRNLRIGAMMKTILPALAHAVVFDRNCAADPAVSLEGIKSQLQDLLIPSLLREGTAFSASSLAMVPGTPIPPMLARITNGLTQSLKAFHGRSFTCEYKYDGQRAQIHKALDGSVRIFSRQMKESTSRFPDLVNMIKELCKPEVSSFILDAEVVGINRKKGNELMSFQELSSRERGNKHSSISIENIKVDICVFVFDIMFHDGERLLDCPLRQRRKYIHDLFHEKPGYFELAQQLNIEACEASPDNSSTLARMDTFFRNACQSSCEGIMLKTLDVDAGYSASKRCDSWLKVKRDYVQGLGDSLDLVPIGAWYGNGRKAGWYSPFLMACYNPETEEFQSVCRVMSGFSDEFYKEMKEFYSGERILPKKPVYYKTDEQPELWFTAEQIWEIRGADLTLSPVHHAAIGLVHPSRGISVRMPRYIRSVPDRSPEDCGTAADIASMFKAQTRKMDVSSEGQE

SEQ ID NO: 71076 - protein, 309 aa, Zea Mays
MWLCAGFCSFCNSKLFWLLFFEPLSIAFDTLQSIMVHGFQLFDIWQQHLMESGADFLDLQKSYKQAAGSFSEWRGKLTRNFGFAIDLISLLMSLGHYSMIFWLRGMAFHLVDAVLLLNSRALIVSFLKRIKAHIKLRKALSSLDGALPDATYDEICAYDDECAICRGPMGRAKKLSCNHLFHLACLRSWLDQGLMEGYSCPTCRRPLLLSSEGQRRSTTAEVANVQRIAEQLTMGMNQQRVPGNEHPVEQQNPSDAVWRGAGLDASWIPPWSSPVMDHPSSSSAVRVLSCSFHFLDFRHCICFWIAAPW

SEQ ID NO: 71077 - protein, 297 aa, Zea Mays
MLRNGETGDWIGTFQGHKGAVWSCCLDRNALRAASASADFSAKVWDALTGDELHSFEHKHIVRACAFSEDTHLLLTGGMEKILRVYDMNRPDAAPRELDKSPGSVRTAAWLHSDQTILSSCTDMGGVRLWDVRTGKIVQTLETKASVTSAEVSQDGRFITTADGSSVKFWDANHFGLVKSYDMPCNVESASLEPKSGSKFVAGGEDLWVHVFDFFTGEEIACNKGHHGPVHCVRFAPCGESYASGSEDGTIRIWQLSPANADDNEVANANGKTTAGVNEVTTKIEGFHIPKEGQTEG

SEQ ID NO: 71078 - protein, 70 aa, Zea Mays
MGLLFLERLEGEGVFRCRRCRVDAASKDAIISRDFYGRSGRAYLFDHVRKPTSKARNTRKGSTSSRELEW

SEQ ID NO: 71079 - protein, 729 aa, Zea Mays
MEESDAAEGVAVQLIDGEGEFAAEGAERFMAAAGVAGCGLSYAVVSIMGPQSSGKSTLLNQLFGTNFREMDAFRGRSQTTKGIWIARCVGVEPCTVVLDLEGTDGRERGEDDTAFEKQSSLFALAISDIVLINMWCHDIGREQAANKPLLKTVFQVMMRLFSPRKTTLLFVIRDKTRTPLEHLEPVLREDIQKIWNSVAKPEAHKDTPINEFFNVQVTALSSFEEKEDQFREQVQQLRQRFSNSIAPGGLAGDRRGVVPASGFLFSSQQIWKVIRENKDLDLPAHKVMVATVRCDEIANEKFGCITSDTEWLDVESAVQSGPVPGFGKKLGNIVDVHLQEYDKEAVYFDEAVRKGKRQHLESRILNLVQPAFQKMLTHLRVKALEKFKTGLNSSLESGKGFAVSARDNTECSLKEFEQGCAVFSHDKDSIPRVWTGKEDVRAIAKEARSAALKLLSVMAAIRWDDEPDRIESILTSTLLEGSVVSKIASAASADPLASTTWEEIAPKHTMITPSQCKSLWKQFKAETEFTITQAVSTQQAHRRGNSKLPPPWAIVAIAILGFNEIMVLIRNPIYLFLLFVGYLMVKALAMQLDVSREFQNGVVPGIISVSVKLLPAIQNLVNKVAAEQQAEHQQQHPHPHPHTQAPGPPQPQMQPPPLLLSPRSPMSELRRLHMPRSPRSPRKVASPAPSSSSSSSAVSSPRHVGEDQKPRPGAVGAPENEATVADSIV

SEQ ID NO: 71080 - protein, 118 aa, Zea Mays
MIQFYGEPKYSLDELATEHSSRLQSRRSERHLVDRQANGNGLFRFQQRSHSPEIVELQEEAAVDVKPHETLRLEIGYVVLMDDAYTQKGFQISDILTGSDPPIYTSAPVEEPTKTCYC

SEQ ID NO: 71081 - protein, 324 aa, Zea Mays
MHLVVYGKENLDCIQGLVERMFSDIKNTDQRSLKCPSHPLSEEHLQLLVKALPIVEGDYLRIIWPITPSIQFYKEAPCHYLSHLIGHEGEGSIFHIIKELGWAMNLMAGECSDSNEYSFFSVSMRLTDAGHERMEDIVGLIFKYLHLLKEDGVHEWIFNELAAINEMEFHYQDKVRPINYVMRTVSTMRLFPPEEWLVGAALPSKYASQRINMILNQLIPETEWIEKAPTEKLHLPKPNIFIPKDLSLKEVHEKVTFPTVLRKSPLSQLWYKPDMLFSTPKVHIIIDFHCPLSSHSPEAVVATELFVDLLVDYLNAYVHVYYLL

SEQ ID NO: 71082 - protein, 124 aa, Zea Mays
MHPRFLQQQLCQQTLDVVLCTGTVVARLHAQPFQTTPPTLGTTSSSSLTHISADPALSHVCVIELVVVPYVIKKSREWVKKRFSRGARQIFNKLLEHIIVVISAKSKSDLGTLIDHMMRGTKAE

SEQ ID NO: 71083 - protein, 585 aa, Zea Mays
MKQPTWVFFEKESVTDLREQILQLIQHDCKDQEEKSRAELLEKLNRCKRDTLIELCRSFDLIGSRANRKEELVLFLMEFIKDHCSGSDVINSDKKYKKRKRVREEENLSAGKPSKKKKREGEEEAEDRVKHSDCDLLDNKYSCADSKNGKFPNEQTNFEPSGRINYSVSENLDGASLSEAPIPTDEQAIITTPPTKFVTAAEDDSTDVKALQRKMSSIAKKKTTSKEDCKVKLCGNRESKGDTKPRKQVIKPSKDELREAVFLILDTADFATMTFGDVVKEVDKYFGKDLFERKPLIRSLIEEELFRLADEAEKKELEESEAAEAKARAEQAAKEMAQVQTVELVINEQNVLEDGRDSNTKDSLKNANDSANKKCIDGGASVEYGFNENSCYAAEGSEEHKVDDDNKNITKDGNGGKVAVAPTANTDCTLQLQGSSNVEAETTMKSNVGTLEASKDGEVRDARNGENNGTEDGGNEGIRSGNVGSNAEAEESHGHGNNERAEHTEDDKAQECSHNENSASVGILGDGDGEAREGDINAEAEQSQADGGGNSKAEDAEHNENTKTDANSSKNGTTAAVEFEYEDVD

SEQ ID NO: 71084 - protein, 541 aa, Zea Mays
MRLPKNWMHLHFLRAIGTAMSMRAGIAADTAAALLFRILSQPTLLFPPLRHAEGVDVHHEPLGGYVSSYKKQLEVPASEATIDATAQGIASLLCAHGPDVEWRICTIWEAAYGLLPLSSSAVDLPEIVVAAPLQPPTLSWNLYLPLLKVFEYLPRGSPSEACLMRIFVATVEAILRRAFPSETPEQSRKPRSQSKNLAVAELHTMIHSLFVESCASMDLASRLLFVVLTVCVSHQALPGGSKRPTGSDNHSLEEATEHSRLTNGRSRCKKRQGPVATFDSYVLAAVCALSCELQLFPCISKNGSHSNLKDSMKIIIPGKNNGINNELHSSISSAIIHTRRILAILEALFSLKPSSVGTSWSYSSNEIVAAAMVAAHVSELFRRSRPCLNSLSALMRCKRDAEISTRASSLYHLIDLHGKTVSSIVNKAEPLEAHLTLTPVKKVNQHRCEENNTNSSDSAKLENKNGSTHKKNGFSKPHLKCAEEVLNGNVASTSGKSIASLQVEASDLANFLTMDRNGGYRDVCRKHISSPRMEEGCGCTL

SEQ ID NO: 71085 - protein, 686 aa, Zea Mays
MARKHGWQLPAHTLQIVAITVFFLLVVAFYAFFVPFLGKQVVEYIAIGVYTPVALAVFILYIRCTSINPADPGIMSKFEDGLINIPTNGSGIEGMNLPQKVNNATGTNSPMSTCRSSLDGHSNQRGSSIGEANMNLGSQLPKKRSSCWLLGGLLCATFVKEDCRKTDDSEQQANGEEALFCTLCNAEWLNNCVGRKNYFTFLALMAISLIWLAIEFGVGIAVIVLCFVDKNASRNIQDKLGNGLTRAPFAVIVGIFTLLSLVACIPLGELLFFHIILIRKGITTYDYVVAMRAMSEAAPEDEEGENIIYSPSNSATTGFSVGSSLGIHHKGAWCTPPRIFIDQDEVIPHLEPGMVPSTVDPDGAGYPERANRAKKAVKISARSLAKLDKNEVMKAAAKARASSSVLRPIDARHGHEADVISSGSASVRSSMSVDYSGTKESNSEMKLSPLHNSYPQSLASQDEYDTGTPTASSLSSLVNIHKLASHSQFSAAPRPAPPERPVPAMVRPPVPTTQITNPGIPRPAVPTTQTTNPMFQSATSYVRENRRASVVWDQEAGRYVSVPAQTRTGTGADLPARNPRFLANPSGEPSSHVRGVAPGNTSSSAMPSGQPSERLTYSGQSIFFGGPMLNTPSLGAQRNEAGARARPEGSRDPNAQQRDIRGEKARTGSLPVFAPGTVQRNPPFDK

SEQ ID NO: 71086 - protein, 355 aa, Zea Mays
MLPSILLPTSTTTPPLPPRRLPRPRHVLPGRNDRSPTVVPASKPKLVGEKSKGGAEACLPSSSGPYGDPAPPGLGNSKVVKVQSEEAWDLFTDRASNEGWARYRRCPRRHRNLLRGHRRARPVQRPVGLGRELESCLDDWSSHSSSAGNPNIPYVVVSKSSIVTAVCKEILGCYRKLLGIPDLLNQPNMSILKQLLQTLQPTENFDDVLSEFQSSLGPCNVDYLYCGECKMLEDIMDSVSSFSYLLSSDVLITIQSIVNSVVVLLDKSGEPNGKNIHMGCSKAIISFLRKRLGYSAHKLLSADFPSEDVGKGWQSKGDLIQKILQIYLRNSDSTSDLLAEIGRELPKAPNTQLFF

SEQ ID NO: 71087 - protein, 307 aa, Zea Mays
MALRPQLLRLLLPSPPHRNPPPPPSSPSVAPIGRRTAAAAVLLLAAGVSAPPPRAARAEPDGEDVDEARIVRLFQEASPSVVFIKDLVVAGPQGRRVGEDEDGDEEGGGAKVEGTGSGFVWDSTGHIVTNYHVVAKLAGDGSASHRCKVFLEGSGGKSYSKEARLIGCDPAYDLAVLKIDADRDQLRPALIGTSRSLRVGQSCFAIGNPYGYEHTLTTGVISGLGREIPSPNGRAIRGAIQTDTAINAGNSGGPLIDSYGHVIGVNTATFTRKGSGISSGVNFAIPIDTVVQSVPNLIVYGTSVSNR

SEQ ID NO: 71088 - protein, 117 aa, Zea Mays
MEETINHLLVQCSFAKQFWFSLLRSVGFQELCPSHDDVCFETWWRNSAARVGKPLSKGFNSLVILGAWSLWKHRNRCVFDNCNPSAAVVLAAAREELMGWRMAGAKALSFFHLEEVS

SEQ ID NO: 71089 - protein, 729 aa, Zea Mays
MAAPRPPPLGALGGVVGGSGGAAPAAGAPAGVSMRMFHGESFLGEMEVFPMKRDGEGGLPFPTNEIRVSHFSPASERCPPLAILQTIAPFSVRCKLQTKLTPPNPGLQRLYLTCFNEFKSAVVVVGDEELHLVAMPTKSGKVPCFWCCSARSGLYAASVGMLNLRCLAIVFDLDETLIVANTMKSFEDRIEMLSRRMDVEDDPIRIAGMSAEIKRYIEDKELLKEFIDMDTVTDNGKIVGTQKEEVQPMSGGQERVFRPVIRLPDRNAILTRINPENRDTSVFVKLRPAWEELRSYLTAKGRKRFEVYVCTMAERDYALEMWRLLDPEGNLISPQQLSERVNCVKSGSKKSLQNVFRDRRCHPKMAMVIDDRLNVWDDKDQHRVHVVPAYIPYYAPQAEMANAVPVLCVARNVACNVRGGFFREFDENLLRKVFELYYENGLLDLPYAPDVGDYLVCEDTSFVPGNKDQAPIPEGMRGTEVEKRLNGQSYRWEQREGQQMPSSIRSPDDEGMPIRGTGGVRNIQPNGGSLAITPSVYVTVLQEIGRLCDSKVEFRSTVSSVRSMLFSVEVLFNNEKIGIGVGKTRDEAQVQAAEKALQNLENSYLSSGAPVAGVPKKDSRKSPGRSGNGFLEDATCSDNDISMREPSGSALKLDHSNNVDTLSSIMSLIREHCLEDQHVVFRDEVQNSSPARNEEYHFQVELAGLILGRGVGSDREAAKLLVIDYPNHY

SEQ ID NO: 71090 - protein, 90 aa, Zea Mays
MERRLRFPEGERPMRPTDDSCRSHTGRRWRAGRTGRRRARRTRCIGDMRVLLSRSCRSVAGPARRLHGQDRGGVLLQRSSVFVSMALSNA

SEQ ID NO: 71091 - protein, 1068 aa, Zea Mays
MGRKKNVAIDDDEYFFPQDDAADPAPPPPAPAAADKEKSKKGGKKGKKGGKAAAPDDDDYEPPPPPPPAADEDDDGEPINLVFTGKKKKKKGATPAAPFSAFSALGEEGEDQDEEDPAPSAAAEPEAINDPAEDDDDVVDFDFSKAKKKKKKDKGPRSAPAKDEDVEPAPPPPPVAEEEDEEPPVIAAAAAKKPQKKKKKKGAFMMDGENVDQILAGMEDPQLMDEPEPEEEERLRREEEERKAEEAKRRRKEREKEKLLKKKQEGKLLTGKQKEEAKRLEAMRRQFLEQSELQKAEDAAPETKKRPIYDSKKKKAQSKATETAKVVEEQQEELNEVNNDEEEYVLVDQESQSQVEESDEKTEPDQETEEPKPEEDEEDEDEWDAKSWDDIDVNLPKISAFDEEEAKPIVKKAEPVQKQENNKAQPAIPAAKKLVPSVADSKKSETDDVGASNGNVKRHKKKGPVKEDNSKSGSDLRSPICCILGHVDTGKTKLLDCIRRTNVQEGEAGGITQQIGATYFPTENIRERTRELKADATLKVPGLLVIDTPGHESFSNLRSRGSSLCDIAILVVDIMHGLEPQTIESLNLLKSRDAVFIVALNKVDRLYGWKKCPNAPIVKALKQQNEDVKREFNMRLTDIVTQFKMQGVNTALYYKNKEMEDTFNIVPTSAVSGEGIPDLLLLLVQWTQKTMEEKLTFVDEVQCTVLEVKVVEGHGTTIDVVLVNGILHEGDQIVVCGMQGPIVTTVRALLTPHPMRELRVKGTYIHHKEIRAAQGVKISAQGLEHAIAGTALYVLGPDDDLDKLNEAVMEEMTRVRSRIDRSGEGVYVQASTLGSLEALTEFLKSPAVNIPFCDFSIGPVHKKDVMKASVMLERKKEYATILAFDVKVMPDARDLAEESGVRIFVADIIYHLFDQFTAYIKNLKEEKKKESAEEAVFPCVLKIMPNCVFNKKDPIVLGVDVLEGIAKVGTPLCIPSKEFIDIGKIASVEINHKQVDMATKGQKVAIKIIANNSDEQQRSFGRHFDMEDELVSRISRRSIDILKQNYREDLTTEDWKLVVKLKSILKIQ

SEQ ID NO: 71092 - protein, 258 aa, Zea Mays
MDVEASHESPPLRSKTMRRLLVATNCVMLALGVTGGQLLSRLYFSKGGHRQWLSGWLQTGGWPLLLPPVAASYVRRRARYRSAPALLTQTQPRILLAAAGLGLIAGVDNLLYAWGLEFLPVSTSAILISTQLAFTVLFAFLIVRQRLTMATVNAVALLTVGAVVLGLHVSSDRPAGVTRSQYWLGFTLTLGAAVLYGLFLPLVELTYKCAAGGGRAVTYALVVELQLVMGFVATAFCTVGMIVNKDFQVMHDNFIYQI

SEQ ID NO: 71093 - protein, 131 aa, Zea Mays
MSLDFKLILDEFNRRFDELEIRWDRRFSSAAYIDLPPTSLSINHSSDASASAPPTPVAVIADNWGGCFDDGEQYRTRPSIVVDNWGGFFYGEDVAPSDNPTRFVLPVASTDEPSIDTAPARANSGAADDSV

SEQ ID NO: 71094 - protein, 738 aa, Zea Mays
MDYDKSRRSNSKKRRHSNSDDGKRKRLSSRHDDTSMSSEPIETIYRILCPAKKIGSVLGRGGDIVKALREETKAKIRVADSIPGADERVIIIFNYQNQPELTDEAAEKQISDGLGNMKPHCFAQDALLKIHDKIVADEIYDEVAHDESSDDVTARILVQGNQVGCLLGKGGSIIQQLRSDTGAGIRVLSSENLPQCALQSDELVQISGAPSLVRKALYEISTRLHQHPRKENRPLEQIIDASTQRKHESPTLQHENPMLPHLHSHHPPPIPLLDPYRSGPQYPVSETEEFSIRILCASELIGSVIGKSGANVRRVEQQTGARIKVQEIDKDASGERLIIVSSNEIPTEPISPTIEALILLHDKVITEMRRRTGAEIRVYSKADKPKYLSFGDELVQVAGPPAIARGALTEIASRLRTRTLRDTSTANNPPPFAPSDDPTVDMPSRKLTLYGGPTNDTPYGRPANDPLYGRPAIDPPFGRPTNDRPYGRPAIVPPFGRPTNDPPYGRPANDPPYERPTNDPPYGRPSSTIAYGRPNRSAPRDPSDAYPVDYFSKREHPSGGPMFTSNAPSAAYERYAAPTHFPTREPPSTFSHRSYRDHMPTDSYSSRGTQKLDITRDGNSDAYDYTEAAGQIHGLEDYRGLPSASGRFSSTIELRIPNSSLESIVGVGGVNLAEIRQISGARLRLHEAHAGSSESVVEIQGTLDQAKAAQSLLEGFISANSRQQQSHSSRMPLYPRWG

SEQ ID NO: 71095 - protein, 63 aa, Zea Mays
MTVSTADILVLHSAEVAHLYPKVVLLICQGITTFHSSLPSRRGREALQGLYKVPLASENPLRF

SEQ ID NO: 71096 - protein, 72 aa, Zea Mays
MCRVLFPVRQCALSARSALIPNRVVDRRPCRCLTALGARLVRALSSHQGRLSRSSISYSPWSSRRLSLSKPT

SEQ ID NO: 71097 - protein, 316 aa, Zea Mays
MDPPKPPSSVASSSGPETPNPHAFTCELPHSIYALAFSPVAPVLASGSFLEDLHNRVSLLSFDPVRPSAASFRALPALSFDHPYPPTKLQFNPRAAAPSLLASSADTLRIWHTPLDDLSDTAPAPELRSVLDNRKASSEFCAPLTSFDWNEVEPRRIGTASIDTTCTVWDIDRGVVETQLIAHDKAVHDIAWGEAGVFASVSADGSVRVFDLRDKEHSTIVYESPRPDTPLLRLAWNRSDLRYMAALLMDSSAVVVLDIRAPGVPVAELHRHRACANAVAWAPQATRHLCSAGDDGRRNKPTSVGGRAPGLDGHRL

SEQ ID NO: 71098 - protein, 417 aa, Zea Mays
MARLADLVEERADELAALESLDAGKHPAVTRAVDVGNAAGSLRYFAGAADKIHGETLKMPGQFQGHTLREPLGVAGVIIPWNFPSTMFAVKVAPALAAGCALVVKPAEQTPLSALYLAQLAKQAGVPDGVINVVPGFGPTAGAALASHMDVDMVSFTGSTEVGRLIMKASAESNLKPVYLELGGKSPLIVFDDADLDMAVELAVGASFFNKGEACVAASRVYVQERVYDRFEERLAERMRSWVVGDPFSDPSADQGPQVDKAQYERVLSYIDHGKREGATLLTGGRPCGPEGKGYYIEPTVFTNVKEDMIIAKEEIFGPVMCLMKFKTVEEAIARANDTRYGLGAGVVTRDLDVANRVVRSVRAGVVWVNCYFAMGSDCPFGGRKMSGFGKDEGMHALDKYLAVKSVVTPLRASPWI

SEQ ID NO: 71099 - protein, 104 aa, Zea Mays
MITKLPQSEQDQMYLRCTHIEYILVHGPKRWNLMQPPPISPTNWSCATCKGASGCAGAARAALAARGRRAHASESRTRQPHAGRTEREHEAALGHKHGPHRSTA

SEQ ID NO: 71100 - protein, 177 aa, Zea Mays
MDCHCLTSRNSAPDYVPTVFDNFSANVVVDGNTVNLGLWDTAGQEDYNRLRPLSYRGADVFLLAFSLISKASYENVSKKWIPELKHYAPGVPIILVGTKLDLRDDKQFFVDHPGAVPITTAQGEELRKQIGAPYYIECSSKTQLNVKGVFDAAIKVVLQPPKAKKKKKAQRGACSIL

SEQ ID NO: 71101 - protein, 89 aa, Zea Mays
MDKGSDYTKKETERLHRMLEKKFLCIDSKFTQQELPACKPILTPKWVGLRVVKIMMLLVTPNLYGNLVANTAAGIVGGTGIMPGDRDCS

SEQ ID NO: 71102 - protein, 60 aa, Zea Mays
MLIAGNRSREPRVRGGRRTAVVWPTRLLASGPRVSTPSDRRSSLVACALLIRAKITGFAC

SEQ ID NO: 71103 - protein, 763 aa, Zea Mays
MVFNNHTEVNRFYRRYARRVGFGVSVRRSSFSREGTCLYLELMCCKGGRPRYEPKFRKRASSTTNCPAKVRVKLWGDKLLHIELAILDHNHPVSPAMARFLNSYKQLSGPAKRRLRMGGPGTMPVEESSKMPMDKLGELEQLLFGESKHNSFVERGRLKLQPGDSEALRLFFTRMQAKNANFFNVIDLDDEGCTRNVFWADARSRAMCEYYSDVITLDTSYVASKYDMPLATFIGVNHHGQSVLMGCALLSDETAETYSWLLKSWIACMYGNLPKAIVTDYCRGIQSAVAEIIPGVRHRMCLFQIMRKAAERLGGLSEYRAINKAMHKAVYDSLTIDEFEEEWNTLITYSGLQSNDWLRSLYECRSSWVPVFIKDTFWAGMSTTQRNETITPFFDGYVDLKTTLKQFLVKYEMALQSKYEKEAQADFETFHKQRPPVSKFYMEEQLSKVYTHNMFKKFQDEIEAIMYCHVSLISVDGPVSTFNVKECIFFEDGKRTMSKIFAVTYKVDEKNISCICGGFQFSGILCRHSLSMLKFQLVREIPQHYILDRWKKDFRQLHVMRRPPSDLVPNNRMDRYDYLSIRCLQLVDSAVLSDKYRLALRLVRETEKFLLNSNTHDDTQPRIKSRVPKVNKPNIVTGQTMVGAATGNGNDGLKGPEATAVTQVPQSQKGGAEKGIVPTGYIGVPANLQQFVGNQTAFRPSIVYMVPLELGDWEEQRRSQGSMLVGDVRKTSGGVGCVAIRRPRVTLGAKSALFQDIDAFLAY

SEQ ID NO: 71104 - protein, 885 aa, Zea Mays
MKLSAAVLFFSILLQYCTSSGQPDSRGFISIDCGIPENSTYQDLTSTILYVSDRGFVTSGENRNISAGYISPSLAQRYYTVRAFASGVRNCYTLPSLVAGNKYLVRAAFYYADYDGLSTPPVFDLYLGASLWHEVRFRDAAAINWMDVVAVAPTDFLQVCLVNKGTGTPFISGLDLRPLRSTLYPEANASQSLVMVNANRCNVGPTDKSVVRPTKAHFSGPTSRYPLDPHDRIWLAYGAVPAWTEASATSVVRNYLADPYDAPSAVMQSAATPSDGSVLSFSWDTSDDRSVDASSATYLLVLYFAELQRVSASGELRRQFDIAVDGTAWNREPYSPPYLFADSFSGTVQGQARHSVSLTATRNATLPPLLNAMEVYLVRPVDEAATDPGDAKAMIAIQEAYVVSKNWMGDPCAPKAFAWEGLDCTTDPPTGTPRITALNLSSSGLTGPITTYFGDLKALQYLDLSHNNLSGSIPDCLGQLPFLVFLDLSSNDLRGPVPYTLLQKSHNGTLSLRLSNNPNLSGNGSGPKKLNGAALLSAIIIPTVAATALSVTFIALLLRALKEQARRRAVDPTPRDETALLENREFSYRELKHITKNFSLEIGRGGFGAVFLGYLGNGNPVAVKIRSESSSQGGKEFLAEAQHLTRVHHKNLVSLIGYCKDKDHFALVYEYMPEGNLQDHLRLRGLEYLHVACKPALIHRDVKSRNILLTTGLGAKIADFGLTKAFSDSETHITTEPAGTMGYLDPEYVSGQSPVVPVDDSVSVHVGEWVQQSLDRGGGVESVVDPSMGRCERGDYDVNSVWKVADLALRCRREASRERPTMTDVVAQIRESVELEAARRSSASGAAAAGGGGGLRSCAGERDAFEVVEGSVGETAGAAPGPAMI

SEQ ID NO: 71105 - protein, 593 aa, Zea Mays
MARAKEDEQIMGIDLESCNLAKRSFYDAMQHDILEIWVATTKHQGGKRKEYWRKPWACWSNPQSRVSSRSDEPKPSYPSSSSANPPRLRYSQGSARQLQQQHQQARSSHQPTTISSDSSQILPPTLHFPPLPRHPAMAGLLHLQSTLLPSASALRRRAGVPVPSSSRRRCRIEAKIREIFMPALSSTMTEGKIVSWTAAEGDRLAKGDPVVVVESDKADMDVETFYDGFLAAVLVPAGDSAPVGSAIALLAESEEDIPVAQSQAASFSSTSPLPSPPQETAAQEASPSPPPPPPPGPVSVSAPTPPLPATQGERVVASPYAKKLAKDLGVDLFSVTGSGPCGRIVAKDVEAALAAPKKAAPVTAPRPDVPLGSTVPFTTMQGAVSKNMVESLAIPTFRVGYTITTDALDQLYKKIKSKGVTMTALLAKATAMALVQHPVVNSSCRDGKSFTYSSSINIAVAVAIDGGLITPVLQDADKLDIYSLSRKWKELVDKARAKQLQPHEYNSGTFTLSNLGMFGVDRFDAILPPGTGAIMAVGASEPTIVGTKDGRIGIKNQMQVNVTADHRVIYGADLAAFLQTLAKIIEDPKDLTF

SEQ ID NO: 71106 - protein, 84 aa, Zea Mays
MHGWVREMVPCPKLSLRDRLPPPDHSSTSGSVVPQILSAFFRYLQCFDLQRFTEPTTYHPHFLMILVKNRVTSLNKICSPNNSL

SEQ ID NO: 71107 - protein, 387 aa, Zea Mays
MENHGKLDGWDEVLEEEDELASVCKYPISTSYLSYGTSRRGKSVKKPRFSLRGYDFVPLDVKTDNLCIGEQDGSSAVPSTKASQTMVAERLENVEEQTEDLAPEFALPPKANTLVSELLDNLQRRGGSFVRTPSLLHQHAPSISIREQEVSSGVPPTKASQALMDEPFENDNGQTEELPSELPCSIKRPKFSVAELLEDLQGRSGSYVETASLDATQNHLSLVNKDENQQTMADLFQEVFNPTNMDGAMKSMRSTGAGNYGRMQQIMHMEKDWHVEFSRQYSREHSYSGDLKGTTVQIMSRSLEGKLTVCSCMFQEKGNDATISNASADGTMDESRTRRTIIFSPKICNNVDLLVGNIIHIFPPWKEVKIQEEHVIICTYFSHHHRT

SEQ ID NO: 71108 - protein, 327 aa, Zea Mays
MLTPSAGIPPPSLSAASSPSTSYSLLYLPRRCRRLPVPRASSSFAPKRSAPVPTTTLPPEAPSTSAAVEAPAPFSVTAPGTYRGGEDPLVSKLRTQLGVIHPLPAPPISRSVVGLFALFFFVGAAFDKLWTLRKRRRAERELKVNGSWPQVPTPSFSLFLEKDLQRKESVEWVNMVLGKLWKVYRTGIENWIVGLLQPVIDNLHKPDYVNRVEIRQFYLGEEPLSVRNVERRTSRRANDLQYQIGIRYAGGARMALALYLKFTKVPVVVPVWVRDFDIDGELWVKLRLIPTEPWVGAVSWAFVSLPKVKFELSLFRLFNLMGFSQNF

SEQ ID NO: 71109 - protein, 213 aa, Zea Mays
MTQLLAVACLSLASKIEETFVPLPLDLQVAEAKFVFEGRTIKRMELLVLSTLKWRMHAVTACSFVEYFLHKLSDHGAPSLLARSRSSDLVLSTAKGAEFVVFRPSEIAASVALAAIGECRSSVIERAASSCKYLDKERVLRCHEMIQEKITAGSIVLKSAGSSISSVPQSPIGVLDAAACLSQQSDDATVGSPAVCYHSSSTSKRRRITRRLL

SEQ ID NO: 71110 - protein, 51 aa, Zea Mays
MVKQINVRPGDMWNSMPKFGTAAESCSTMGGSLRATISDEFSIHSASLRTD

SEQ ID NO: 71111 - protein, 141 aa, Zea Mays
MKVECLSGSPPMAISYVSKVPWTSPFHTLWRFMELLKTARPSVLKFAQILVPTLIPRFLMSCASWRVAGSSTCSCRDNHRMEDLQPTEACLKLNVSALNLRFGYMFLHCMEDLQYPVTRHYWTSISMYKQRRTANTSKICS

SEQ ID NO: 71112 - protein, 67 aa, Zea Mays
MPDEAAAGCRWIGHRYVVRAHQLMITTTGLHVIIQLSVSYLKSVVPVLKRKNEGENQLHMSFRVPFA

SEQ ID NO: 71113 - protein, 261 aa, Zea Mays
MVQIAAPPRRRDGRAPSPSPGVMHATPPPRCHGALAFAPVNHGRQCRRRPQPRPHLPPPTLSHDLCRHVSAFGGPSSSSSALGGPSSSSGQICVWRPVLILIRAPPPAISAAASSPPSPVISVAVRTWVRSDLRLVAIPVLILFLAPTPTLHPISDLGEDDKVIVERCARERSRPPAAPHHRREATRGDAQAVTLFLLHPRPPLGPRGRAIQRGTVLPIKDTCGGEEGLLALALWATHWLKKYIYIYSPESEEEEKEEEGE

SEQ ID NO: 71114 - protein, 232 aa, Zea Mays
MYKHSGQLEFINARRWCMHDEAVVHYIDMIDQTTLGHRMIKKQFNKTPRAGWQIDPFGHSAVQAYLLGAELGFDSLHFARIDYQDKKKCKAGKGLEDDILMFDYNVEERVNDFVVVAIEQDGQVHALYSTPSIYTDAKHLSNVSWPVKYDEYFPYADSKNSYWTGYYTSRPTFKRYVRVLSGYYLAARQIEFLVGRRSSLGLFTTSLEDPMAIAQHHDAVSGTTNNTRQMTT

SEQ ID NO: 71115 - protein, 168 aa, Zea Mays
MPFPTCPRRPSVDASRAQILIRFCVRGPAPATGLRAARHFPAWGPPGSVCGPAHSVPTVAQPLVRRARTRSSASRELGSCPAASAAAAMCRLAHLPSLHTTPGWWARRRSAPTCCLLPSLTPSTTHVLDLPINSRPFVPAQPSHPHLPSAARCSVVRRTHAATARPPR

SEQ ID NO: 71116 - protein, 196 aa, Zea Mays
MDLIKVAETKTRSMEEEVIKLQKCLQDKDEQLCSSTSSTEQYHHELDDLRTHLSFTQATGEAELNEKDSSLKDHRLRVNNLGEQLDLLQKDVQAREVTQMQLKDIVIRIETNIMDEVAKAFEIAMLRGGIGILSTHWTNKTKNLESQILLCALVTTIENMNLGAWRGGAPTVADLFLYVQFLEKATCTNSALGSVM

SEQ ID NO: 71117 - protein, 57 aa, Zea Mays
MSARRCYSTISQDTESITKYHIIAPASGHRPQPSTKYIYLPDLRNTSPIICIINLVT

SEQ ID NO: 71118 - protein, 523 aa, Zea Mays
MAFLVPFLLGLSSVLAAWIYSEFLGYRASSSHEKVHSDVHVGDKTIKENDRAVLLEEGESKPPSTKAPNMSARAKLIRFITLDESFLVGNRATLRAIAEFGIILVYFYTCDRTNIFAESKKNYNRDMFLFLYILLVVASTITSLKKHPENSVVSGKTVFYLNRNQTDEWRGWMQVLFLMYHYFAASEIYNAIRVFIACYVWMTGFGNFSYYYKKKDFSIARFAQMMWRVNFFAMSCCMVLDNDYMLYYIAPMHTLFTLMVYGSLFVLNKYNEIPSVMAIKIAGCLLTVILIWEIPGVFEIFWAPFTFLLGYKNPEPSKMNLPLLHEWRFRSGLDRYIWIIGMIYAYFHPNVERWMEKLEESETKVRVLIKGTIVTASLMAGYLWYEYIYKLDKHTYNNIYVCLRNCTQQLRSTHLSLFVWLGKITMESYISQFHIWLRSSIPNGQPKLLLSFLPDYPMLNFLLTTTIFLSVSFRVFKLTNVLKEAFIPTRDNKCLYQNFIAGVAVFACLYCSSLFFKTYQQYS

SEQ ID NO: 71119 - protein, 63 aa, Zea Mays
MVPPNCLGEIQGSCYHFKLLARYLIKISSCYLVEIPTHRLQIIDAISALALWHQHRIHRLIPS

SEQ ID NO: 71120 - protein, 102 aa, Zea Mays
MWRPVMRRASDDGGSTSSSNAPSSSCNGGYPAEEVLWRGRVAPTFRRPWRAGCEGIEGPSPSKRPEPCPLLERERRGGGEGTGDSSWISSESLLNSTTKGLP

SEQ ID NO: 71121 - protein, 56 aa, Zea Mays
MFILLMVWRRKIKILFIFLSLISFLSRYCVHVNSMEKKNPDVLVSCLIFFPSPYPR

SEQ ID NO: 71122 - protein, 284 aa, Zea Mays
MAAAARRAIPLVLIFLVSAPLYAADASAAAAGAGANSSSFLLAAEQTQRKDPLDGLRYYTGGWNISDEHYWASVGFTAAPVFAAAAVWFVVFGIGLFIAGCCFCCCPGAGDAYSRACLCVSLVLLLVATAAAAVGCAVLYDGQGRFHGSTVATVDYVVRQSGDTVANLQRFTGFLETAKAAGVGPVALPDDVKGRIDDVVRKVGAASDELAARTASNAAKIRAALETVRKVLIVVAAAMLILAFLGLVFSLCGLESIVYVLVFLGWILVAGTLVLCGTFLLLHK

SEQ ID NO: 71123 - protein, 227 aa, Zea Mays
MPTINSTEQSPYHREQDLKGKEYGNIDNIQAENQVEFDERNQHGGSDVYMRDQRTEEATGFIPNIDEYDQNSAVRSNGLGSRQSALPASGGKESLVLGYVRGASEIRSRRLIAQGPHAGSGPRPSEKTQNVSGNTNMQKLPIHVTGDAVAFDHQVPMEKVADARKSHVKTAQANDVSMMTDKSKDLIQPSSMLQAQKASGAAGSNTTGQPEAQHILSFCTKNQQNRH

SEQ ID NO: 71124 - protein, 143 aa, Zea Mays
MIYAMILFYLYPLAWFLFIFLPSLSNLRYTILSFNLNARMIWKQWWQHQLKDSLQSLLHKSFPMYCRAQVNSFTMLAFSPPPKQALLKMDNLQSLLHKSFPMSCRAQVNSFTMLAFSPPPRQALFLAKVQELQSQLETKRQKR

SEQ ID NO: 71125 - protein, 64 aa, Zea Mays
MVLFVLIMGSDPKSVAIYYQLYISTYLNLWKCQLCESSLVGFGGLDDNPIKGLTSVLSVEQVLN

SEQ ID NO: 71126 - protein, 53 aa, Zea Mays
MPRIFFAAPKSFISNSLLSCAFKAAISFMLLATINISSTYSSKYVGDPLTNFR

SEQ ID NO: 71127 - protein, 107 aa, Zea Mays
MESIMMSDLKRLKKIKFRTHKVIYRRYAGLFFSICVDITDNELAYLECIHLFVEILDHFFSNVCELDLVFNFHKVYLILDEFILAGELQETSKKAIIERMGELEKLE

SEQ ID NO: 71128 - protein, 714 aa, Zea Mays
MKLKMSFNEMKLQVESTRAEWEEDLRRLESYFEAQNHNAYQKLLEENRKLYNQVQDLKGSIRVYCRVKPFPKAQSDQRSTVDHIGENGEILIANPQKQGKDGRKIFTFNKIFGPSTSQSEVFADTQPLIRSVMDGYNVCIFAYGQTGSGKTYTMSGPDVTAEETWGVNYRSLNDLFEISQTRADSITYDVKVQMIEIYNEQVRDLLMTDGANKRLEIRNNSHVNGLNIPDANIVPVKCAQDVLDLMKVGQRNRAVGSTALNERSSRSHSVLTVHVQGKEVISGSTLRGCLHLVDLAGSERVDKSEATGERLTEAKHINKSLSALGDVISALAQKSSHVPYRNSKLTQVLQDALGGQAKTLMFVHVNPETDSFSETMSTLKFAERVATIELGAARANKEAGQVKDLKEEIAKLKLALDEKENEVAQFKDLANRVTSEMRNARTRSPLTASMSLKPEVSQESSVDTCTSEIRSSSSGKQRRFRSPLSVRELDDKSPVISRELYLSARKYKTPSPPVRSSLSVERGSFAKIVENTGSIDCTPISKVEVPPKVWSSNSKTTPSSVLTAQSLRKFRDSEENRTKIPPAVRQSMAKNRSESTPKTHNEEKPANRHHSGTKARSEARNTRDSSEIENEFAGDEPTFHFNRTAKKLPTKVMSRQSQNIDVSVRASVRGEMEPLTEGRQRRNWSKPPHAERTNMPLPDIRRSVSLPRGKNPLV

SEQ ID NO: 71129 - protein, 172 aa, Zea Mays
MPPPPPVNPQRLSPAESRERTLYFFHGLGVDVPLPVSAERPDAYTSLVRAIVSSAAVTSSRVSCTLTVSPAVANQYNTLHGGAVAAVAEAVGMACARAAAGDKEMFLGELSTAYLAAARLNNTYNTLHGGAVAAVAEAVGMACARAAAGDREMFLGELSIAYLAAARCDVIF

SEQ ID NO: 71130 - protein, 237 aa, Zea Mays
MYGSPVSKDLNLPAQPPPMASSGLLRYRSAPSAVLGGLCEDQLQLPAAAPSAADNVFSRFLPDHHIRDDKPSPAHFPSAADMASHHQQEQMMFHSQSQSQHQQETGRSGGGLYRTVSSGMEAGGTGVGAASSLIRQSSSPAGFLDHFGMDNGEEDEDQRADQEAAGARARHGQGDCTCTHRFQCALSCCHMLCQDHSGRPARADDLLAFPLPCSKPTPPTCWTWPSTTSRISRSRSR

SEQ ID NO: 71131 - protein, 314 aa, Zea Mays
MLRQNKGSSSAAPAKVTANQAPSTQTVPATPPQTSAAPDAPAPIVPVSAPAATATASAAPAVAVSTEADSYGQATSNLVAGSNLEGTIKSILEMGGGTWDRDTVLRALRAAYNNPERAVEYLYSGIPEQMEVPAPPPSSQPVDPVQAVQPAQAGPNANPLDLFPQSLPNDSANANTGNLDVLRNNSQFQNLLGLVQANPQILQPLLQELRKQNPRVMQLIQENQAEFMRLISEPLEGDEENEMMLDQMADATETIAVTPEENEAILRLEGMGFDRALVLEVFFACNKNEQLAANYLLDHMHEFDNDDGLGGPPL

SEQ ID NO: 71132 - protein, 96 aa, Zea Mays
MSEHGRQELRTNEYQLDDDDEPFWLAVVRDLAVGFKGLVAFLAEQPRQLKHLEWPGFLHTLCLLLHYQLLMLPSATCWPGYFENLPRIMLEYPCIA

SEQ ID NO: 71133 - protein, 198 aa, Zea Mays
MPPGKKGPRVPRCHAEPTPTDYEKQRAITIMKNNQMMQRLGIRQLQSMMASIPSGRMNDNAPHESGSLYDGDDIEDSEDEMVSKESLVDKSVASHIPNNGAEISSKNTRASKRVVAPGVQEQPIRVTRRRSATINQESNQNIMAGILSDSCDATNQDCTQRISTVVQPSSPIETESEDPTGDQELVPRQRSMGRQLES

SEQ ID NO: 71134 - protein, 1250 aa, Zea Mays
MREPIRTFQWHEFFPHGTNNIGVVISLWAPIILVYFMDTQIWYALFSTLIGGIYGAYRRLGEIRTLGMLRSRFESLPEAFNERLIPSDANKSKGLRAAFSSRPKASGDESEREKRAARFAQMWNAIITSFREEDLIDNREKDLLLVPDCKDRELDIFQWPPFLLASKIPIALDMAADSGGKDRDLTKRIKSDPYFSFAIRECYASFKNIINTLVFGQREKDVLVQIFTVVDKHIEEETLITGLNMKNLPALSKKFVELLELLQKNKEEDLGQVVILFQDMLEVVTRDIMEEQDLLETLDSLHGANSRKHEGITPLDQQDQLFAKAIKFPVVESNAWTEKIKRLHLLLTVKESAMDVPINLDARRRISFFANSLFMDMPNAPKVRNMLPFSILTPYYKEDVLFSLQNLEERNEDGVSILFYLQKIYPDEWKNFLERVGCKNEEVLREDEQLEEKLCLWVSYRGQTLTRTVRGMMYYRKALELQAFLDMANNDDLMKGYRAMEVMSEDSPLKTQCKAIADMKFTYVVSCQLYGIQKRSNEPCAHDILRLMTEYPSLRVAYIDEVEAPSKDRIKKIEKVYYSVLVKASVTKPNEPGQSLDQVIYKIKLPGNAILGEGKPENQNHAIIFTRGECLQTIDMNQEHYMEEALKMRNLLQEFEKKHGVRHPSILGVREHIFTGSVSSLAWFMSNQETSFVTIGQRVLANPLRVRFHYGHPDVFDRLFHVTRGGVSKASKIINLSEDIFAGFNSTLREGNVTHHEYMQVGKGRDVGLNQISLFEAKIANGNGEQTLSRDIYRLGHRFDFFRMLSCYYTTIGFYFSTMITVWTVYVFLYGRLYLVLSGLDEALATGKRFVHNTPLQVALASESFVQLGFLMALPMMMEIGLERGFRTALSDFILMQLQLASVFFTFSLGTKTHYYGRTLLHGGAEYRATGRGFVVFHAKFAENYRLYSRSHFVKGLELMILLVVYEIFGQSYRGAITYIFITVSMWFMVGTWLFAPFLFNPSGFEWQKIVDDWTDWHKWISNRGGIGVAPEKSWESWWEKEQEPLRYSGKRGTIVEILLALRFFIYQYGLVYHLNITKKITKDNQSVLVYCFSWVVIFVVLLVMKTVSVGRRRFSAEFQLVFRLIKGLIFITFTAIVVILIAIPGMTVLDIFVCILAFMPTGWGLLLIAQAIRPVIQKIGLWGSIKALARGYEILMGLLLFTPIAFLAWFPFVSEFQTRMLFNQAFSRGLQISRILGGHKKDRGTRSKE

SEQ ID NO: 71135 - protein, 350 aa, Zea Mays
MGAGLHGHRVHEAPEENHGCNEEVWLGLMRSTYPITEKGKQRSWVGPSGQYYRELPCPSCRGRGYTPCKECGIDRSSLDCPMCNGKGIQTCLQCSGECVIWQESVDEQPWEKVRSSSPLKVKEDDEVDKLEININNPKRSKRTYASTSPEVAKKISRSLRSLNAQTGLFTKHMKIIHQDPELRAQRVAAIKRTKGTDVARKRASEIQKAFFSDPENRLKRSIAMKGVKFYCSKCGQEGHRSFYCPTLREGSTRVRFRCRLCGREGHNSRTCGKPKSEKEHKQRPHHCSRCGEKGHNRRNCPTSTDLGSDASGYVVNKVNGSNSAVYQCSICLEKGHNRRTCPKRKATLLK

SEQ ID NO: 71136 - protein, 75 aa, Zea Mays
MSLSYAMTNMFFKSISNQVIGVLKGNWSLRRRQRLPLRNSSFAAAPRDSPSLWERAKGLRLWYNLNSFIYDQRGR

SEQ ID NO: 71137 - protein, 81 aa, Zea Mays
MHAAVLILLPQRLQTRGLGWTTAGGRLPFLARPFNSARRFDTRGTARPAIQSARVVPPRRALARSRLLLHVFHVAGLLLRV

SEQ ID NO: 71138 - protein, 516 aa, Zea Mays
MAPSALASLPAPLRSLRLKTKQQELLLRVSALALIYVLAFAVRLFSVLRYESMIHEFDPYFNYRTTLFLTENGFSEFWNWFDSESWYPLGRVVGGTLFPGLMVTAALLHRLLRALSLAVHIREVCVLTAPFFAANTTLVAYAFGREIWDSGAGLVAAALIATVPGYISRSVAGSYDNEGVAIFALLLTFYFFVRAVNTGSLAWALASAFGYFYMVSAWGGYVFIINLVPLYVLVLLVTGRTKSRSPQTTSGKTTGSKSAAKGVVDQSLPFQHNAAIGLLLGAFYLLSRYAIHCTWVTSEAYSSPSIVLAARGHNGGRVIFDDYREAYYWLRQNTPPDAKIMSWWDYGYQITAMGNRTVIVDNNTWNNTHIATVGRAMSSYEDEAYEIMQSLDVNYVLVVFGGVTGYSSDDINKFLWMVRIGGGVFPVIKEPDYLVNGEYRIDKGAAPKMLNCLMYKLCYYRFGELTTEYGKPPGYDRVRGVEIGNKDIKLEYLEEAFTTSNWIVRIYKVKPPKNRS

SEQ ID NO: 71139 - protein, 91 aa, Zea Mays
MARNEGAEVCANTARHREERRRAGARGRAGRDERYGKQAEGATRAERNWGKAAALGARLDATSMRDGGHGKELGGWARRHGRAPKSFVVRA

SEQ ID NO: 71140 - protein, 729 aa, Zea Mays
MEEGASSPGDGGGMQFQVAVAVRGDGRASRRAARWAAASLVPPGGRVALVHVIPPVSFVPSPSGERVPVDKMEPEVVEMYAQDNRALAQEIFLPFRRLVGRGKSVETVVLEGDSVAEALVRYAAESGVRSLVLGSASLSWFRRILRLQDVPFTILKTVPSSCNIFVVSRRRLTIKIANQARSSKPNASIRIQSISHKAFDQIQRDWLQDKQALNNLADDEIPKYSENSISGSFSQVCSSISTSSIAVKSSESHRRGFLGSLGRRTPGRERNKDFDAIGQLKEVHYVALSSVEEYQHIDEEEKLRKELKDTLMMYDRACGNLAHASKKIQLFSSDCCEDVNKVQDALQREEVLKQTVPDEKNKHLEAIGAVEMAKNAFTHETYSKHQAENAKAVDALLSTGKSCRRYSKHEIELATDYFSDAKKIGEGGYGNVYRCTLDHTEVAVKVVEQDSINKIDEFLREVEILGQLHHPNLVLLLGFCPEIGCLVYEYMENGSLEDLLINDKGQPLHWFLRFQIIFDVACGLAFLHGTKPEPIVHRDLKPGNILLDKNYVSKIGDVGFAKPISDLVPEGLTEYRDTVIAGTLYYMDPEYQLTGTVRPKSDLYALGIIILQLLTGKRPPGLVNSVEEGIKRGILSDILDKSQPDWPIAEAEMLAKLGLWCTALKCRDRPNLESVVLPELENILSRVTVSLKLENILAPSHFFCPILQMGTPMNTGQSKLGSKNTRYPQ

SEQ ID NO: 71141 - protein, 63 aa, Zea Mays
MAESPPVAGRPMAPIPGLAAILGVVELSKCLEVPTSTQHRSTVAATLELVLATVPILVPASHF

SEQ ID NO: 71142 - protein, 220 aa, Zea Mays
MDAGVEKCGDAAAEGGGDLYAVLGLKKECSDADLKVAYRKLAKKWHPDKCSSSSISVKHMEEAKEKFQEIQGAYSVLSDANKRLLYDVGVYDDEDDEDSMQGMGDFIGEMTQMMSQRQESFEELQQLFVDMFQSDIDSGFCNGTAKGHQVQGQAKSRTCSPRSPPTTIVKEAEVSSCNGFNKRGSSAMDSGKPPRPVECGAGQSQAGFCFGLASDERSCN

SEQ ID NO: 71143 - protein, 268 aa, Zea Mays
MNNHISILVILIVDVSVVLLLNSHVGLCSCYNRIFSFGDDTMDTGNFIHLIGKAPSKYKEAPYGKTFFRHATGRISDGRVLIDFYGKPPKDGNIISDVIADISHFIEELIVVNGAKAFVVANNFPVGCLASYLSRFHSDDHEDYDEHGCLKSFNEFSQKHNEQLYSAIGQIRYSYPNVKVIYADYYNATMEFIKKPSRFGIGDPLVACCGGNGPYHTSMECNGTAKLWGDPHHFANWDGMHMTEKAYNIIMEGVLNGPFADPPFPLSC

SEQ ID NO: 71144 - protein, 116 aa, Zea Mays
MGAAESVPETSIHESLCSEGENCSSKITSAKPGLFGSSNGTLPSFWWTRTGRSLGDTERRQLQCRLRTSRRPLTNKDLMSSSHPWSPTCRNRHSRKYSVVGAFRRLCLSVVNLCTV

SEQ ID NO: 71145 - protein, 371 aa, Zea Mays
MATPTSTVTRGGNRHWHCTQVLPLLLLVPLCFALLVESGGIPTTLDGPFPPATRAFDRALRQGSNDVPLTDPRLAPRVQPPAPEQIALAASADADSLWVSWVTGRARVGSSNLAPLDPAAAGSEVWYGERSAADAASYPHVVTGSAEVYSQLYPYPGLLNYTSGAIHHVRLRGLRPATRYYYRCGDSSLPGGLSDEHSFTTLPATGAGCYPRRVAVVGDLGLTGNSTATVDHLARNDPSLVLMVGDMTYANQYLTTGGKGVPCFSCSFPKAPIRESYQPRWDGWGRFMEPITSKIPLMVIEGNHEIEPQGHGGEVTFASYLARFAVPSKESGSNTKFYYSFNAGGIHFIMLGAYIDYNRTVLVVGKGFAEG

SEQ ID NO: 71146 - protein, 431 aa, Zea Mays
MARALLLLRVAVARYPPLPASPALLQPQPLLRCHAPSQYKSQLRFLSSLSSSVPNSSDAPSDGGGDRDGEEDGAKSGSHVDYLGMSDEELMEQCDMGTFKASGPGGQHCNKRESAVRLKHLPIGIIAQAVEDRSQHKNRASALSRLRTLIALKVRRPINLEDYTPPVELLQILPLKSSVRGNDVGPQIGPNNSKFSPGMQALLDLLFAVEDSVSDAAKILGLSTGALSRLILSDDSLRTAANELRASKCFFDCRAPVLYYVLLTLQDSVHKVFYAVVEAAAVRADNSHLGGLARYPVSATLPQIGSRLFLTWGVFWSFPEMAPFTSTNRYLIPILYVSVELVKALQAHIINWDIHMFDEEIGNTTQVHTSNLNEPMRTLAGFIQFCLIKPGGKFDHADRLFQSIENAYINSLSNTRWGTYRRCCSPSMGKG

SEQ ID NO: 71147 - protein, 198 aa, Zea Mays
MSAISRQQGKLGGGSLRHGVQAYSRHQQQPMANDDPMVDEAGVEDAFTHEITDYLYVPRYHVLSWMETVEGMVAGVAALPPVYLILNRDLLETGWGWKRLVPYRPGYVEWHVFKKYLGDYFDHNREAFLCAEQKPDPFGWIIAEKSALIAAAKLCLKMEKALLRYCASFLTPDDKRLILGIKDQAKQMIQSEVVQRNL

SEQ ID NO: 71148 - protein, 306 aa, Zea Mays
MCSLPAADVKHMLADNCRAKIWSLTSMTFALWDAKTRELLKVFGIDGQVDLARPEAPVMPEQFIEEEIKVKPTKRERPQGSFTFFQKSRNALMGAADAVRRVATKGTFVEDNRRTEAVAQAMNGTIWSGCTDGSIIVWDGNGNRLREFHYHSSSVRCIKTLGDKVWVGYASGTIQVVDVEGNLQAGWIGHSCPVIDMAISDSYIFSLAHHGGIRGWPLSSPSSLDDILCYELASRELLYTRLENLKILVGTWNVAQEKASPEALRSWLGGAFFDVGLVVVGLQEVEMGAGVLAMAAAKESLSYGLR

SEQ ID NO: 71149 - protein, 99 aa, Zea Mays
MAGEKKVVDPALAGFYEAMEKTNIEKITNEMLAGLSEDSGDSECFDLESGNEDAEDRPLQPSHTIFGKSSIKQSQIDAMKGRYFRDISIVRAGGDSAAP

SEQ ID NO: 71150 - protein, 271 aa, Zea Mays
MAGVSAAARRVHPGGVREKLVGAQDTEILLLLANWREAQTIHRVLATQLFFMFLPLSDKSRLGCKIARFISKYVIEYFPVTLHVEDYGAFDPNRAYVFGYEPHSVLPIAVGILGDLVGFMPLPKLKILASSAVFYTPFLRQIWTWLGLAPASRKSFYSYLGAGYSCIIVPGGFVKIAIEMGCPVVPVFAFGQLIDRPEGGYLTADLPMPRGEIVIGGPNIIKGYFKNEAKTNEVYKQGIKYSDFSDLCQKQEAVKEVLGSLAKIPFFSITY

SEQ ID NO: 71151 - protein, 97 aa, Zea Mays
MELSLVGLQNAGKTSLVNSIATGGFSEDMIPTVGFNMRKVTKGNVTIKLWDIGGQPRFRSMWERYCRAVSAIVYAFHPRSPAVMLSCVVLHTCLLFC

SEQ ID NO: 71152 - protein, 222 aa, Zea Mays
MVSVNLGLVHYVLDHIYGTLLHRTKLGTPFFSKGWGGTKLDLLEKMVKQLFPEARCQNWPPTAVQPMWKTVWETNNSCLREGVFRTTCDERLIDALPPESHNARVAFLTPKNVTPEKMSCVVHLAGTGDHTFERRLRLGGPLLKNNIATMVLESPYYGQRRPSMQRGAKLQCVSDLLLLGKATIDEARSLLYWLQNEAGYGKMGICGLSMGLCTSVLHMPAL

SEQ ID NO: 71153 - protein, 158 aa, Zea Mays
MNGRQEIARQTLIDELVSFSAVREVKVVVVFDAANSGLSTHKETYKGVDVVYSADLSADSWIEKEVEALVADGCPKVWVVTSDALEQQLAHGEGALIWSSKRLVKELKESEKELDLELKETRSTSLQGKLLQHKLNPKVVRALKGLRNKLEEQERGKK

SEQ ID NO: 71154 - protein, 1079 aa, Zea Mays
MGFDNECILSIQSLPGEYFCPVCRTLVYPNEALQTQCTHLYCKSCLAYVVATTQACPYDGYLVTEADSKPLVESNKTLAETIGKVAVYCLYNKSGCQWHGELSACVTHGTACAYGNSPVVCNRCGTQIVHRQVQEHAQVCHGLQSQTQQADGSQVQLATATTQPVIQDSSLASAGSAAAAATTLTKPSSTTATAVTDSAAATGGAAGATTAAVPSSASSISASQTPTAEQWYQQQQQLQYSQYYQQQHPGSNPYMQQHQQYDQYQQAYQQYMQPPMQVPSQNVVQGSAQPASYVQPQVQSSQVMMQAQSQPQVHPLTSQPQLQQHPVQPRPQSHPHISHVQAPSGQSQLHQPIQSAQVPQVQPSQVPLQPSGLQVQSAAHPSAPTQVGNQQFATQAMAYQVQPHVQAQPPQQQHIVAHQQHPHMQALPLQQNIQPKMQLNSQVQLQPPHVQQQAYPQSQVYPQQTHHMHSQNTTYAQQQTQGALMQPVHVSHQQTHVSHHPAPMRPPSSGHQPALQHPQAQGIQHTSQHEKHIGFHAQWPTMYSNIPSQAPPQGLSVHSSVSSQSVQSYQQGMSSSQQMHSQPGQPYTQQHVTGNTGQHVQTSAGRPMAHLAPTQQFQQQHPAMLRTESPAAGHSIGQGPLDLEKHTSKSGKLDNATIAAVGENKNSGPESVVMRPTKSQLGDENMNSEHNGFVGVRKDAVQTGIVSHNLDGSIRRDGNTDQAGNSHGPLVQGGKDHKASDASTDHEKGRLFQQASLQNAGAPGSYVPPGVVPHPSGPDKMLPQHMTNHGHMHGFSENIRPPLQQPYGVFHSGTITRPFGENQIQMPMPQPGGIRPGDGMIRPCLVGPLPGHHGAVLPSFDLERLGQPRPLGMLNSNDFGGEGFNASGGAAPPFANHRSAGLHEDFPRKQNATASHPDFLSHGAEFDHHRAIGMPNFRNPGPFAQGTSGGPGGPPKHQLGSGNLPGNLHSFEGDMHPGDPHLVAEYAQHGFPKTAAHFGLGGFLRNGNSGWCRICMFNCGSAENLDLHVQTREHQQCAMDIVLKMKQDVAKRQKLNYGGPKSFNNKKVSGKGHFRGNRR

SEQ ID NO: 71155 - protein, 371 aa, Zea Mays
MASPHLPFLSFPKTLPPLPPPLKTHAHRTSLAAAPAPPPAPPDGAGPAAPTRGDRFLGRQLATEAAARVLAPEDADRRRRRKEKRRALARKPSGLASCYGCGAPLQTAEEAAPGYVDPDTYQLKKRHHQLRTVLCGRCKLLSHGHMVTAVGGHGGYPGGKKFVSAEQLREKLSYLRHEKALIVKLVDIVDFNGSFLARVRDFAGANPIILVITKVDLLPRDTDLNCIGDWVVESVVKKKLNVLSVHLTSSKSLVGITGVISEIHQERKGRDVYILGSANVGKSAFISAMLRTMAYKDPVAAAAQKYKPIQSAVPGTTLGPIQIEAFLGGGKLYDTPGVHLHHRQAAVIHADDLPSLAPQSRLKGRCFPMLN

SEQ ID NO: 71156 - protein, 855 aa, Zea Mays
MGPWAVDLALSVGIFPYVLKLLPTNTIELRQILVFIWTKILSLDKSCQVDLVKDGGHTYFIRFLDSLDAFPEQRAMAAFVIAVIVDGHRMGQEACMNAGLIDVCLRHLQPENLHAQTEPLLLQWLCLCLGKLWEDFPEAQLLGLQTNAPETVICLLSEPRPEVRAAAVFALGNLTTLSNCPDDDSDDDEKVKAEINVVRSLLQISSDGSPLVRSEVAIALTHFALGHNKNLKSVAAEYWKPQSKSLLKSLPSLANINNPSNVYSPNNILQGSIGPVLRVGSDSGAAGRDGHISTSSPIAASSIMHGSPQSDDSSQHSDSGILLRENASNGGLSYTRSRPVDNVIYSQFISTMCSVSKDPDPRIATIGWRALTLIGVEQVAMKSTRFNSGGLHRGETSASTFGMAHSSSWRDMNSGSNSMKFMTPPVSPPQHDYLLLGLRRVCSMEFGQHPINSPDGFANLLLSSATGPSNAELKKLPESTIYNWSCGHFSRPLLTASDDNEETNARREERERIALDFITKCQRSSCKITSQIASWDTRFELGTKAALLLPFSPIVVAADENEKISVWNYDDAQPVNSFHNHKLSDRGLSKLLLINELDECLLLAASSDGNVRIWKNFACKGGQKLVTAFSSVQGHRAAGRSIVIDWQQQSCYLYASGDMSSILVWDLDKEQLLNTIPSSADSAISALSASQVRSGYFAAGFADGSVRIYDVCSPDSRPVYVARPHAPRTEKVVGIGFQPGFDPYEIVSASQAGDIQFLDVRMAAEPYLTIEAHRGSLTALAVHRHAPVVASSAKQMIKVFSLEGEQLRIIRYLPSFMGQRTGSVNCLSFHPYKSLLAAGAGHNALVSIYAEENYK

SEQ ID NO: 71157 - protein, 92 aa, Zea Mays
MVTALGHRFTSLFLSRRPHVYSLFPLAVCHSRHPPNTGGHTPPPPRLLLRPSTHVPTPSPRAHAFATTHPTPMPSPTPPPHLTRPWSNAAVP

SEQ ID NO: 71158 - protein, 192 aa, Zea Mays
MSMVAKMLQGPFGGPGCQNQEHEKHFEHFTPNMSKARNESAFPQDEIDSHREHFYNELTSDSIASKKPKIRKRENNNSVSSSAPNIPNTQGGGGFLWKTEIPEDGNCGDWLSIPLGDVKVLVNEITSVRSKRILHEVPMDTVTRLLDVIDRQIRYSQGLSIDVKENVSYLPCHSSLHDYSCFVARINLTTML

SEQ ID NO: 71159 - protein, 296 aa, Zea Mays
MPVKDVVAWTSMVSGYVDSRMYLKAVEVFNEMRGADDLVWPNEATVVSLATACAGLGSLEHAKGLHSYVEKAGLEDELIVRNALVDMYGKCGCIESAHRLFCLMREKDLHSWTTMISGLSSHGRGEEAVGLFFSMCEEGVLPDSTTFIVVLSACSHAGLVDEGIHIFNSMESEHNVPRDTKHYGCMVDLFSRAGLVRRAYEFISMMPFEPNLEILGALLSACSINNELEIGELVLNKIDMVCSYKGGAGVLLSNIYANQNLWHEVDTIRRKIRTEAIVRKPPGHSLIAAEVSSMTF

SEQ ID NO: 71160 - protein, 732 aa, Zea Mays
MSRHCVTLPVIIFGLLQMAVALYSNPSSTHPNCTERCGNVSIQYPFGIGSGCFRQPDFSLTCDDGGGGGGNQPPKIFLHDGITEVLPDSGGTVGLSRLIDVAISHTIFMAPGIPSYNFSWNLSSFTMFDGSFNVTGCDFDIYIQEPGTNGSLWPCTNRCPQSITTETVARHDCNGTGCCIVYLGISVRDFQLKFVRHDNGARGDHDALSNGSALWDTINITSNWAQIYWDIDDQPTCARAKEKNINYACVSNHSQCFDDEVFDVGYRCACNSGYVGNPFVVDGCKRDEGYSPNQLKENCSRSCGNISVPYPFGLEEGCSARKLFKLNCTNATASMLQFDDDRVVAFINVTGSLVGIRFTSQFEDGQLGIYVSGEPDLFMGLGESVVSMHWAAANLTCDEALKNKSQYACCSNSKCLGVNSKDGYIGYRCKCLDGFQGNPYSISDGCEDIDECKTQHICKENEVCNNVAGSYYCTKTTKQQGLVLGVIIGLCVGFGILVSCLGGMLVIRRWKRDIQKQLRRKYFRKNQGLLLEQLISSDENARNNTKIFSLEELKKATNDFDTSRILGRGGHGMVYKGILSDQRVVAIKISKIMEQGEIDSFINEVAILSQINHRNIVRLFGCCLETEVPLLVYDFVSNGSLFEILHAAEASNDFQLSWDDCLRIALEAAGALYYLHSSASVSIFHRDVKSSNILLDGNYTAKVSDFGASRLVPIDQTHVVTNISRHFWLLRS

SEQ ID NO: 71161 - protein, 155 aa, Zea Mays
MAKNHYLEISDRLQENHDNTQPSDNHNYSVDQTQLPFLQALLRVQMKRSHRFLDKLPVVHWHLLTDKSIDPTYLVVMTATAAVGAATLLQRVIQIRTKPTPPNPRRPSSVQAFHSSTSCAGHQSRAIRKAVAQSAVHRFSAFKLLKRFSRVSSKN

SEQ ID NO: 71162 - protein, 87 aa, Zea Mays
MEDTFFFNDFRFDSMAGWTDSSASLLLVMPAPQGPVPAAAGGDQDAQIRHPIPARGAGARARPPPLGRYFHAHRPDPVPHAGARRSG

SEQ ID NO: 71163 - protein, 253 aa, Zea Mays
MEGPCELEVLGKKGMVQLNGRGLARVGVCARDGGLHRNHWTKIKSAVNQIETHPYFQRDSLVKFCQKHGICVTAHTPLGGSTTNAEWFGRVSCLDDPVIKSSAEKYGKTPAQLVLRWGLQRDTVVIPKTSKVERLQENFDVFGFDISGEDMERMKAVDRKYQTNQPAKLWASTCEGNCKDLRTLSGRMKKVGQYLLRRRTHYMSQFEKLAMELMPKLGEHFVEEMINPSMYGSRWFITVFSCSFPFHLTLRVL

SEQ ID NO: 71164 - protein, 132 aa, Zea Mays
MAHERRACLVGRRSFWHFTNAETFLLDSASPAPHRRAASSIAAAASIDPRTTRMAAEDSKDILKKRLPKKIREVPDCYFLPRRSWPSALAIYGAVCAASFGAGMLLEVWINKKIKVALSGRWINDAMHALLW

SEQ ID NO: 71165 - protein, 457 aa, Zea Mays
MNETLNSLSHVHIISDNDGSSKASYGASSFQSGSDKAITYFYFDFSASWPRTPSWISLLRGHTFYSSFARIFKRLIQQCGMPVISSLQSTLEEFLISKERPRQCVAAEAMAGMLHSDIIGNLECENNWLMAQLHKIMLAPSVESAPEWAACIRYAVTGKERAGTRAPVLRQKVLECLCTPLPHSMATSVLAKRYSFLSVALIEISPPKMSPAEKQYHVKILDELLDSMNHSSAQVREAIGIAMCVTTSNMRLSGLFGTGCSPQGLHGDVSMIEQTGNKYWSERLTDGANELAVSIQNSTQSKQLESTSDSAEDSMDDREQADAKRMETIFHFMIASLKSGRSSVLLDTIIRLVYPILSLQETSNKDLSLLAKSAFELLKWRILHRPFLETAITSILPLVSDPNWRTRSALLSYLRTFTYRHTFILSGSEKSQIWQTIEKLLVDNQVEASICSFDSVQ

SEQ ID NO: 71166 - protein, 53 aa, Zea Mays
MMARGDMPKSWTRRRFHTEATNGGSTQAHTTRTRQPAAYGAAGTEGGAQRDGD

SEQ ID NO: 71167 - protein, 191 aa, Zea Mays
MSNSVFPYLSFRCYRALEFYYTLVSLETPVGHVKTISTGDGQVFLQLVLPLAYYMMISSSSLLSILVIERVDERVGLSCLVSLLSLILVSSACERVLDDMRLWVILNFVPCIAIPAMLFLFPPKYTHSRFWFLATGLYLLARFEGLADRKVYSVNRYFISGHSLEHLCFALVTVMLTVMLTFRNIKIARDS

SEQ ID NO: 71168 - protein, 121 aa, Zea Mays
MSSSPLITAAASAAVVALAVANRVLYKLALVPLKAYPFFLAQLTTFGYVAVYFSMLYTRYRTGLVTRDMLALPKHRFVAIGLLEALGVFAGMSAGAMLPGPAIPILSQGGHIRPDKSLVAS

SEQ ID NO: 71169 - protein, 101 aa, Zea Mays
MASRSARQGKTPAAGATQGETSGKLGAWGAHREHHGARLAGKERRNGRAGEAREGCDHAMQEAEGRGMRGGYSRAGKLRAVPGSRGAVAMGREKLGQGEPR

SEQ ID NO: 71170 - protein, 142 aa, Zea Mays
MCVIALHCRRHINKLMIQNILLQHNYLPLALLKASAILMRMVFIVFSFSPSGLSSPCACDVKLCCTKYSSSASHLSNNLSSELLSRIKLRNAMQAIIICFCVRVEKLGMPFKIRHFCFKTPKALSITFRRDECKKLNISYFP

SEQ ID NO: 71171 - protein, 260 aa, Zea Mays
MAPRSRAPSRRPLWFIVLVAFVCVVAIGAYLYTPQHYTACYLVPSEACNSRPPPEPARVYTDDEIAARVIMRDIIRARPVQSKNTKIAFMFLTPSLLPFEKLWEKFFMGHEDRYTIYVHASRDIPSHSSPIFAGRDIRSEKVIWGTISMLDAEKRLLAHALQDPENQHFVLLSESCVPLHNFDYIYSYLMETNVSFVDCFDDPGPHGAGRYSEHMLPEIVKKDWRKGAQWFTVKRQHAILILADTLYYGKFKRYSRKRMA

SEQ ID NO: 71172 - protein, 167 aa, Zea Mays
MFSCTWTGPCPSLYVPRPPRHPLLVWVLVAGIFGDKPRLPPFVVVAGDLIVSSRSSSLPAAISACPSRRCRSIHVLCHWMLVELGTCFLLRHRNSSPLASRRRAVIAYHVGTPPLVLRRSSGAPSSTTLVQGRRVRVSDSSNLVVVVFAPTLPLHARLRSPLQFLGI

SEQ ID NO: 71173 - protein, 238 aa, Zea Mays
MVLGQQKNQSRKRRFSRSSDDTDNSDLPCPQCRNEFGGFRCSPGSVHLQCSGCGGMMPARSNISIPQKCLGCDKAFCGAYWYSQGVSSSHCNLICNQDTLKSIYQRHISALPDTIHGGNPYEKDITERCIQQSGKTLQVVISEWISKFDNMEIDRSRLQLNNVDAITSRTYICNHCYSKFVDFLLYWFRVSLPQNLLPRDAAERESCWYGFMCRTQHHRPDHAKKLNHVCRPTRGNQP

SEQ ID NO: 71174 - protein, 102 aa, Zea Mays
MRRLDARSMVLFGVPFGLDLCEIAASIIHSLLLPLRSLSQLALLCCFLLSFCLSMDRHCKARRAIQSASGSLHACSCWLAGRPLEAIGRQAPKELKQIRKGS

SEQ ID NO: 71175 - protein, 270 aa, Zea Mays
MKTCLTKVVYVQSMLLSKALKMQQDLEDKKHEVIIGNLESKIKEQSATIEKKNFELQATEGLLAEAEAKITELNTKLLCQSEQFEQEKQELNAKLEAEVQENSDLKKLLASLQDKCLEFSNKCIQRLRKIFYSVGASSEKFTPSAEDLPKTFEHIEGEIDELDEVIAGHGDFCAWVASRGTAAAFLKAGCDHGKIVNRPNFTLSPTILDDIPDLARSISNRFVKMIWTKGGREKAGDEARSHLEPVRNHTLCLPFPSSLVLTHNNLIYVG

SEQ ID NO: 71176 - protein, 398 aa, Zea Mays
MFGRGSPRMNLIQAAAMQRVSPRSTTNKRKKRTSPKVGRLRANWNSGLEKGLVEILQDHNNDCYKGQNGWSSEAWNRIVKLFHEKFPYVTFTKCQIQDKEKELKRDYKALKEARQQSGVSWDERLCRIEAEEPIWNNLTISNERLKKFRTKSFPLFEALGELHDGNIAEGTMNFTSIEPYRPPVTQPCQGAATHPSQAAFMLTQPSQPSFTQPSQPAFTQPSRIAYTQPSQAAFAQPSQAAFAQPSQAAFTQPSQAAFAHPSQATITQAISNEDDDLRVLDPIAPTSVSKRAKNVGAGSSRTRIDKRGQDGKVVEMMERFLEMKEKQDEVEKRATTNANEDDFPITTCIAIVDGMEELSDDEKVDAYDVFKDAQNRAIFMIAKDATRIKWLRKKIART

SEQ ID NO: 71177 - protein, 279 aa, Zea Mays
MGSSSAPAAAAAAAPSRRKVALYLALLTLQYGAQPLISKRFVREDTIVTSLVLATEAAKVICAIILLIAEGSLKKQFSNWTLTGSLTASGLPAAIYALQNSLLQVSYKHLDSLTFSILNQTKLLWTAFFTFLILGQKQSSRQVLALALLIGAAVLLSVGESSSKGSKGGGSDYILLYGIIPVTVASVLSGLASSLCQWASQIPVLMNAVGGILVGLVTTYAGGVRKGFVIVSALLVTALLQFIFDGKPPSLYCLIALPLVASSIFIYQKHPYVDRKKKD

SEQ ID NO: 71178 - protein, 372 aa, Zea Mays
MGKEKLHKQPSGRLIESLKMERMRNILTHRYPYPHEHSRHFIIAVFACWLFFISSDNLQNLIMKLDKNFKWWSMYACLIGFFYFFSSPFIRKTIKPNYSNFNRWYIAWIFLAALYHLPSFQSMGLDLRMNLSLFLTIYISSLIFLMVFHIIFLGLWYLGFVSRMAEKKPEMLTIIQNCAVISIACCVFYSHCGNRTVSRDKSIDRRTASWIVFSLWTKHDDNTLISRLLRMHKFKEQICSSWFAPVGSASDYPLLSKWAIYGELSSNGSGSSNEISPVYSLWATFMGLYIANYVIERSTGWVLTHPLTISEYEKLKKQLKPDFEDMVPWYSGTSTDLFKTVFDLMISVTLFVGRFDMRMMQILVMVATLHML

SEQ ID NO: 71179 - protein, 627 aa, Zea Mays
MKFMKLGTRPDTFFTAGSVRSVCTEVATDLQILVDNCLYHLHKFPLLSKCMLLQALCADAVAGDVVELRGFPGGGEAFEACARFCYGITVTVSARNLVPLRCAAAHLGMSEATDRGNLAAKLDAFLASCLLRRWKDALGVLHSTRHYAPLCEDLGLTSRCVDAVAALIASPDTALPSRSTSASPWWAHDIAELGVDLFWRIIVAVKATGAIHDRTVGDALKAYARRWLPNVAKDGHGLSAGQPFDHDAGSAVVKQVTTRHRLLLETIVSLLPAERDAVSCSFLLRLLEAANILSASKAELVKRVAWQLEEASVADLLIPSLSCVSETLYDVDAVSAIIDEFALRCAAVPPALALSGSPDDSPAHSAGHRRSRSAESVSFDGTRRSLSAAPVSQGALVQVGRLVDGFLIEAAKDPNMPLDKLLAIAEAVPDSARPEHDGMYKVVDTYLKAHPEMSKSARKRLCRVLNCRKLSEKACTHAAQNELLPLRVVVQVLFFEHARAAALAPGAHALAAADLPSNIRALLSKSGSSEDEEAERADEQRLRALAAGASPGGDWSVEGLRRAASKIATLRMKLAEDEDRDADEFARKAGVARSASLRFRAFCAFPAGKPKRMLSRLWPLGRNGVSH

SEQ ID NO: 71180 - protein, 332 aa, Zea Mays
MGTATMATAVGAAMLLYFVLSRRLAGEDVSARGGGGGGVGSGKRRRGRALRRPVQPPATWIEAVGTLAETLRFTYSETLGKWPIGDLAFGIKYLMRRQGNLHVASVYAGSDCIELKGPQIMEELIVLRRLIDLCFLFSKKPFPVFRELAGFSQEDVLIEEPKAGILKPAHTIIRDECTKSFLVLIRGTHSMKDTLTAATGAVVPFHLSLLDEGDVSKLVLGYAHCGMVAAARWIARGVTPCLREAVRQCPEYQIKIVGHSLGGGTAALLTYILREHKEFSSTTCVAFAPASCMTWELAESGKHFVTTVVNGADLVPTVSTASIDDLRSEPLL

SEQ ID NO: 71181 - protein, 726 aa, Zea Mays
MFDAGSPRPAPHKSNSTSAPSHGYPGSTAPAPVRLPPPKGKGEGNFAHAPNHPNQYHSTSYSPGSALPPAHPPDIPAFRKPKILAPAPSQSLLPPPTNSYCTTPCSDPLTNSPPGMTCLCVLPIKVELRFGIALYTFFTLVPELAQDIASGVFMNQSQVRVMGANAAPDDPEKTIVFIDLVPLGPKFDNATAFSVFERFCNKQVIINHNHFGKYDVLYVLYQGLPPSPPAASMNNGLSNVNGPSLHPLAADVGNYRERKGRHVIIIIILSSVCAFILCAGAALVLYFKLRNHIHLTEASLVPTKPTGPVSAMVGNRLESRPISASPSFSSSLVAYKGSAKTFNLVEMERATLGFDESRIIGEGGFGRVYEGILEDGERVAIKVLKRDDQQGTREFLAEVEMLSRLHHRNLVKLIGICTEGHSRCLVYELVPNGSVESHLHDKGAAQFDWNARLKIALGAARALAYLHEDSSPRVIHRDFKSSNILLEHDFTPKVSDFGLARTALGEGNEHISTRVMGTFGYLAPEYAMTGHLLVKSDVYSYGVVLLELLTGRKPVDMLRPPGQENLVAWAGSLLTSRDGLESIIDHSLGRSIPFDSIAKVAAIASMCVQPEVDQRPFMGEVVQALKLVCNEGGEFNESTFSQDLHIQDVEVMSRASTDVDVDPTLSAELFTSSARYDAIDAPGSFRRYSSSGPLRVGRTGLNKERGLSTGSSSEHVGLQRFRIDGE

SEQ ID NO: 71182 - protein, 231 aa, Zea Mays
MVLQLLPVNSLSCKQIERRSCISLEAFIRDYFLCESPVILSGCIDHWPARKKWKDIKYLESVAGDRTIPVQVGKNYACTELKQELITFSQFLERMWSSDSANLAYIAQHQLFDQIKELHEDIAVPEYCSAGGGKLQSLNAWFGPHGTITPLHHDPHHNLFAQVLGRKYVRLYPASTSVGLYPNTESMLSNTSETSTTLTEKSTRRLQLLSSWTAYWRKVTCFTFPRNGGVT

SEQ ID NO: 71183 - protein, 71 aa, Zea Mays
MVPHHHLFFLSIFPPMEVNANMLLYCLIFCRKCLHLVSIFRCINSLRKVGGSLYFGILILPFLQQFEYIGS

SEQ ID NO: 71184 - protein, 393 aa, Zea Mays
MVPDNTIDNVVGIGVFLVVISIACLVIHIWIKTQQQREQAILKLQRVSLAIKGVINLWSMEGGNLGFSQYDYSHIKEATNNFSVDNKLGEGGFGPVYKGQLRSGIKIAAKKLEACSLQGLLEFQNEIQLIAKLQHKNLVKLLGCCTKGDQEKMLIYEYMENKSLDYFIFDNVKGADLNWSKRLHIINGIAQGLLYLHNYSRLCVVHRDLKASNILLDSEMNPKISDFGMARIFCSNAKESNTTRIVGTHGYIPPEYAFHGVCSIKSDVFSYGVLTLEILSSKRTVQFYEYNQKLYNLISYAWQLWTDGKSDELIYSPPGNVREEIERHIQVALLCVQENAEHRPDMERVVTMLNSKDVDLPKPMQPAYFHVNPSEEEVSSRSINMTMSITLER

SEQ ID NO: 71185 - protein, 97 aa, Zea Mays
MPSIASNQAGEGVFGSLPQMPQPKVRHAPFLSVSVWFMPNIRQPRKVWRVTQPLPYFFTPHLGRSFWPPHAARPTPPLTSLARRRTWIWLSSPPSTD

SEQ ID NO: 71186 - protein, 150 aa, Zea Mays
MITGDQHAIGKETTRRLGMSTKCTLPLLYSEQNKDESLASLPIDELTEKADGLSRVFPEHSVINRVVLTGRAIFQKMKDYTLGFMLLALIWKFDFPPFMVQIIAILNDASRKDDDASRIYARARSFVRGKEGKSGRHTIVVGGASRGVGV

SEQ ID NO: 71187 - protein, 726 aa, Zea Mays
MLLLRANALAAVPVSFSITPAASYSCFPWPSSSTTAASCSVGSSARLDAAVQYDPLRPGSDAWAHPDGMVTAEGDEEKQRYDTEGESNDWEGEGPQGSSDPEGINVPRQRYIAVPKEALLDAVLSQFASDDDDAADFKRCARCLDAILHAEHKRMLEEMRTSYMLTQRHRDEEEEQDDTDTASGSDYVNGKAGSGFFGITQLDGTLFLTRSVDLRTLLGLTPDPDSQTRVAFATQFQRSFMTLLRNAQFEELSAQDLLLTYALNNDYLLTLPIYVDWKKAAQSNAIIFRRGYATERQKGLLLVEKLDYLQSKLLQNVFFSLSKPLKKPGKWLNEALKRSTDNQGFQIWIDKLRLWLKEQTYADNSLLLIESSSWDKLSSDQLPDADVPIWIAAQRAVSRYEGILSPVGPRGRLLRRLLKWTGLIPSLPEATIKSNNETKHLEGHVRPNFLPRITLANIWEPASRESCNNNIWEMVKASFRILFGRSTLQEPAFQELILLYTDEVVPSETKDEMVPLQLKIYERIPIPDLPVVFPHKKLSFRILDTVRLDIATVIGQLFLLDIVAGTALVILVFRVALGYKQTRDRYQLLVNKTLYEKTLASGFGSVYFLLDASEQQQYKEALLAYAMLLCRKKYEVSSRASIRDACEQFMHEKFEAKVKDDGYIIVSVLMIEMPIDKAMETLLRLGLVIELPTDGGSSVIGLPCSEAYRILKSRWDGLLEQDTEQG

SEQ ID NO: 71188 - protein, 382 aa, Zea Mays
MGNCCRSPAAVAREDVSSSHFPASNAKKKPHQARNGGGAGQKRLSVLGDEGCEVVGIDDKYVLDRELGRGEFGVTYLCMDRGTKELLACKSISKRKLRTAVDVEDVRREVAIMRHLPKSPSVVSLREACEDDGAVHLVMELCEGGELFDRIVARGHYTERAAASVTRTILEVVQLCHRHGVIHRDLKPENFLFANKKENSPLKAIDFGLSIFFKPETEQGVAQAILRGNIDFKREPWPNVSENAKDLVRHMLEPDPKLRLTAKQVLEHHWLQNAKKAPNVPLGDIVKSRLKQFSRMNRFKRRALRVIADHLSAEEVEDIKDMFKTMDTDNDGIVSYEELKTGIAKLGSHLAESEVQMLIEAVSIHRIILETDKVDFCIYYLL

SEQ ID NO: 71189 - protein, 65 aa, Zea Mays
MEPTDGRAGPPPSSTASMARASMAEGDRAEQRQINKNNLQKTSCTWHQRRARAGALSGRRRTRPT

SEQ ID NO: 71190 - protein, 117 aa, Zea Mays
MGMIRSTPPLVQDTRRTILRGPCHRGLYPLSTDSSLKQANAVDKPTVSKWHNRLGHPSLPMVTKVIDNNNLSCSSVSNKKSVCDACQQAKSHQLPYSRSVSSTSFPLELVHSDVWGP

SEQ ID NO: 71191 - protein, 553 aa, Zea Mays
MPEQNGVVERKNRTLLDMARTMLDEYKTSDQFWAEAVNTACYAINRLYLHRILKKTSYELLTGKKPNVSYFRVFGSKCFILVKRGRKSKFAPKAVQGFLLGYDSNTRAYRVFNKSSGLVEVSCDIVFDETNGSQVEQVDLDELDDEEAPCVVLRNMSIGDVCPKESEEPPQAQDQPSSSMQASPPTQNEDQARDDDEDQEEPPQEEENDQGGDANDQDKEDDEDPRLPHPRIHQAILRDHPVNTILGDIQKGVTTRSRVAHFCEHYSFVSSIEPHRIEEALQDSDWVLAMQEELNNFTRNEIWHLVPRPNQNVLGTKWVFRNKQDEHGVVRRNKARLLAKGYSQVEGLDFGETYAPVARLESIRILLAYATYQGFKLYQMDVKSAFLNGPIKEEVYVEQPPGFEDSEYPNHVYKLSKALYGLKQAPRAWYECLRDFLIANGLKVGKANPTLFTKTLADDLFVCQIYVDDIIFRSTNESTCKEFSRIMTQKFEMSMMGELKYFLGFQVKQLQEGTFTSQTKYIEDILTKFGMKGCQAHQDTHGNQWASRPRHGR

SEQ ID NO: 71192 - protein, 363 aa, Zea Mays
MAGLERPRRRPPPDPVAVLRGHRAAVNDACFHPSLPLLFSGAADGELRAWDTASHRTASSVWAHAGSVGVYSVAAGAGLGNKIISQGRDGTCKCWAIEEAGLSRKPLLTIKTSTYHFCKMSLVKSSFTHATESGSSSSASDVEPQIVPTENAECHGVNPTIGPQEHDQCTTSNGHNMLAIAGQESSQVELWDITSARKIVTLPQTCSANATDHPTKKKGLCMAVQAFIPHESAGYVNILSSYEDGSTLWWDVRKPGLPLSSVKYHSESALSIAIDGFCNGGISGGADDKVVMFTLDHPKGTFILRKEIELERPGIAGTAIRPDNKIAATAGWDHSCCCCCICDLFGGFNLAGFECTTTTKEML

SEQ ID NO: 71193 - protein, 417 aa, Zea Mays
MRGRRQRIRRSPSSRTTTSWSCCGTTGASSRSPRRTRGRRPPTTPTARAPAASPAKRPPRGSRTPSTTRWRRTCTRSSGTAPSPTPPRSTRARSRALPRSLRLRRPLGAAASSRAGLATSARPSAEATRCSGRRQGSGGRTRHCSRSCRAIPARTTAHRHPAGLEATMGDSGCPVTASMYRRGRGGVETTQIVRDAECEEASEETKPSRRYGTKRRTRAAEVHNLSERRRRDRINEKMRALQELIPHCNKTDKASILDETIEYLKSLQMQVQIMWMTSGMAPMMFPGVHQFIPQMALGMNPGCIPAAQGLSQMPRLPYMNHTLPNHIHLNSSPAMNLMNPLNAANQVQIGHLRDASSHLLHLDGGRAAVVPQVPGPGPHVHGHQIAQAEEHNKILEVAASTVIPTSKAGQPPTLHRV

SEQ ID NO: 71194 - protein, 144 aa, Zea Mays
MANSLSNTPNTYEQDISIIGRTLSKFDEDNLIPCFGFGDASTHDQDVFVSLLTRNLAMDLKKLLDNDQHPLHRCEAKWWTIPRPVDNCRWEVAGRHGSLALLPQQRPPAPFLARREMDRRIHGSLAGWSISKIFESCFLLWSHD

SEQ ID NO: 71195 - protein, 422 aa, Zea Mays
MAIAEHTPSSSSPFRQHRPTGWVTFTAATPLLALQLALLAALVMATDPSPSPELVELTLLTGAREKGAVCLDGSPPGYHLQRGFGSGSHSWIVYLQGGAWCSSNTTDTETCSERKMTAYGSSKLMGAVTFDGIFRNQQPQNPDFYNWNKVYVRYCDGASFSGDAEGEAQDGTKLFFRGSRIWDAVVDELMGKGMDAAEQALLAGCSAGGLATLLHCDDFRARFPQEVPVKCLPDGGFFLDIKDLSGERHMRSVFSGVVQLQNVSGVLPKRCLAKKDPAECFFPAELIKSISTPTFIVNSEYDSWQIANVVAPDGSYTGDAWTSCRDNIRNCSSEQMDVLHGFRAELIRELKVAEGEREWGLFVDSCFTHCQTQSSDWWHSPTSPRLGNQTVAEAVGDWYFGRRRVVKQVDCEYPCNPTCSIQ

SEQ ID NO: 71196 - protein, 50 aa, Zea Mays
MGSKILSTECTFTSLTRLRKKTLKDMLDLGIKERLLARINFNSLQKSLLK

SEQ ID NO: 71197 - protein, 341 aa, Zea Mays
MNFGGNGNATIRCKYCRASLSVIPGERAIQCAQCNCVTRIRRADRIPLARPAHVPPAFQRARGKKRAVLVGITYAGARRGCGDLRGPVNDVKCMRNLLCQRFGFPDDQRDPFRLPTKENIRMAMHWLVQGCSYGDSLVFHFSGIGAQVADDDGDEADGYDEAICPLDAFQSGPILDDEINEVIVRPLVHGARLHAVVDACYSATVLDLPYQCRMSRNGFWQWEDESPPSGAWKGTSGGHAVLISGYSEGKGNFAMMPDAHASVVGAMTHSFVRTLECQPRGVTYGHLLSSMRAIMKNRGGGCDLQGAIGAPIRTVANFSGVQEPNLSSSETFDIYRKQFVL

SEQ ID NO: 71198 - protein, 476 aa, Zea Mays
MAAEGPTWTALAEFKIIAEHIGTRDLVQEFLAFRVFPTMKEWTMPKLKGEKKEGELVRLPYYYKFKKYFKAPCQEWLDTIEVMSNEILGNYSKKEDQLMTAAFGTRPKRRLNRVLDAIGFEYADYGRLSGDAGGPKRKRIASAADEEVAKVAKKKRGDSEKLSPEELNPEPKVATARKRKTASPEPKTLVQEEDTPATPFAVEVEEIMKVMTEPLPVKLSPLALELTKFFLKDKAASAEEGPALPKKRRIIQIADVIHGTPSPTPASRIAIDQTAETAEAKGATTEATRAETFEAETGAAEAAGVETGATEDPNLEETLEVIDNILLKMTEEESVVATASTATKKGKKQTEDILGEEDFEFQDLLGQELTDAEKAELKKCAIACGYKPGATLFGGVNEGKLRCLRNRSEAKIVRTLCKNIGLPKLETDLCRYQRHHIAGSLLYANFKVTNIFVILLLLLLSFRSFSNEDRFDRAYY

SEQ ID NO: 71199 - protein, 103 aa, Zea Mays
MHLWPSLRIRDSFKHGYLQKLELNLGNMKRAQRQRQGRQGESQEDQDGQPGGNGKAPLLEDRSPSGSVLAGALELAWDAVLLLTCCCCCFCCGEKHSILTSRI

SEQ ID NO: 71200 - protein, 75 aa, Zea Mays
MAWSPRAIFGVFTTTVHIITVAVTSISRQTFQNLLGDFFCISLRHCYKKPQILLFIETQLHLGSSLLIFRHLRGY

SEQ ID NO: 71201 - protein, 1469 aa, Zea Mays
MILQSNAQKFSIIPILGLVGLGKTTLARLIFLDQGEGWDFDLRIWISLNRKLNIKMIASDIISQCNHREEKLLDVRTDMEIQENFQLLKRCLQEALHEKHCLIVLDDLSSTDKNQLDELKEMLKGTNESIKVLVTTSSEITAELLHTIPPYKLCPLSEDDSWKIFSQKAFGNCDGDNTDLKKIGKEIVKRCEGIPLLTHSLGLVVQNEVTNVWLAARDEEIWKLERRVATKIELFSPLYQIYNDFSSTIKLCFLYLSIFPKGSTIDKEKLIQQWIALEIIGSKHDSLPPYVNGEMCIQDFLSIYFLQVRDTHSVYGMDNRVVPTTFYIHNFVHEFARHVACDDIIIFDGTKMQKGCAKRQTFQYALLTCYRVQSTFSHSTLTRTRALHIMNSEAITFPREAFELLKHLRVLNLSGCCIEELPASIGCLKRLKYLDVSGVQIQTLPFPVSRLTNLEVLDLSKTCMKELPSFIGNLQNLKYLNMQGCDKLQNLPLSLGHLQRLEQLRLSCCRCIAMLPDSLCNLINLRILDLSRCTMLRHLPALFGNLVNLEDLSLSSCFNLKQLPESFGNLYFLRFLNLSSCYELQQFPESVTNLEKLEVLILRRCCRLRILPPSFAMIKYLRILDLAGCEALHVSTEMLTTNLEYLNLQRCLNLQTQPYYFENFNKLKFLNLSHCLPTVDCLESISYLFNLEYLDLSETSLDIPMSFARLQKLHTLNLTGCAPMHPSSNVHQTWPGILAKITSLKSVLTMDPVLAASLQGHTECSADYDYHSLTTTDELVIKEITGGSRGLRIAEQLNLQNRLEVCFLKLEWVPRSQSAQDQLLEYTDEEVLEKFQPNETLEHFMLVKYTGNVFPTWMMNKLTSLPYLVNLCLFHLHNCSALPPIGHLQNLRYLHIKDMPNLTNLEMGLSGGPVSLGKLTHLKLEALNLEELSILLSANNESPCFMFPNLEELSVLSCSKLVFKPSVPKCAKYVIKESNMVLSCWQPLGPFSSPPIEKVEISGCVMPSGWLQWLRSIQTLEKVVIDGEALSSFELQKIYAFQEASGSKISKETVSSSRTNMSRELTTEDGALKAIGIDNSTIKHIPRFNTTSELSVDTISSSKVSTPSKEIPSTLRRPDKSKMPALIPGDGSLNLSLKQVQKVTHNFSPLFELGEGGTWAVYRAVLSDNQVVIIRRAKKGHVQEAKHLMEVKLLTKINHWSLVRFLGFIDEKDECIRITEYVPNGTLREHLHGDALICYNLRTSNILLTESYRAKVCCSELSKSGNIVLLKGTGGYIDPEYLETSELTAKSDVYSFGIILLEIISSHGPQDWDVLMNHRQSSVVQWALEKFYDDLMNEILDYRMEDRVDGDVVRDLLSLALSCVVSRGADRPSIVVVGERLWKIWQDHRRNVGEQHEYQGSWAEFIEQEGILRHHKCVLKRSWEPSTTQQDWSVYVRQIELVQEAYDTPWGEEIFSGSVSLDDITVYSR

SEQ ID NO: 71202 - protein, 64 aa, Zea Mays
MHAFSAPSLVVVFLLLSMPRGCRPRSSPCQVRAPGQRRGSGRGGQHVGCPAMWRRAVVSRASFH

SEQ ID NO: 71203 - protein, 926 aa, Zea Mays
METLYLMSTKDDVYSVKIITRKHWVLVGTHDGFILVYEYETGMKLITRFKAVSNIFHGYSDGVLVVHPTLPYVLSAYGREMKLWDWDKGWECIQTFELGRYGSIRQVAFSPNGTDNFATASSDRKIKLWSHSSPTAEYTLCHHKRDVSCLDFFRGDDSNQYLISGSGDYTAKIWDLQKKTCLHTLDVMSPVTSIISLPNSPYLIIGSEDGTVHLWRSPSFRIERILQIGCTRPVRSLCLVGSKRVLIEKMGEVSIMDIDTSIKEPPELLLHVHPTTLVFELQPGKLSQCSMQLTNDTDQHMAFKLSSTDSVDWLEQFLPWYGIVAARSTYTLILNVFLERDTAEKRFCDMILESCTCEYNDNNMYSATTYWEKFVDQETKKVVNEVKLTALLSSSQHRQSIVAPDKVSWVEKPWIRLLSVDAHPTEPWIITGHECGHLAIRNHDTQMLLCSFKVSRGGVFCVKFIAQKQWFICSSGEGFIHVFSYETQEIQNVNNFRAYDDNSRWLPISLAVHPSRPYVLSWCRYDSEIIMKLWDWDKGWECARTFRSGGINVDHIAFDPKETNRFVATDCLDGKVMIWSLDSPEPEYHLPKTDFKGIMFLEFFTRYGRQCLIIAHEDHKAHVWDFRLRKFVSEKRKLLSREASVFLRPNVSLLLTPSSKGTCRFWDAKKFSFYGVIDNSAGGDVLGIACLMGSKTRFVIGQYYALTILHLDNAIYQKDPRQSIEPQLCAHTRQGDTSSEEKYGEEMVWHHGPNFDWQHEPFDAAIMRASGGENAHEQYTLFDIMIDSTEVRAQRMSSSFCSMSLSSHQPKEQELEVARLRGELRQRDEHHKVQQDYMFSFIQQQHEIIQELSQQHGLDVVLPEFRPPLPPMLPQLSPFLSTISQATTDASGTEPTGMAFVESFAYPPPATDSNHNSNNPCSDFGA

SEQ ID NO: 71204 - protein, 425 aa, Zea Mays
MAAAAAAGAASSILSSTPPRRLTFPPAHIRKPLAAAAPKALNLSSQKLPPLSSSATASPPPPPDGDDKPDPIKLAFARAAAYKKGRDSHSPSPSPAPAPPPTPPPQSSPPSQPQASVSEPGSKEAFKRALEYRNGNGAGAGAAGGDSPLLGGSPDFGQNALISEEVSFGKRGGYEFDEADFLGLDFFEKKRSKGLPPGLAPAFEPLRDDDFPEVDIIVGDPSKFDKSPRRTEIQPVDNGESGEASQSTTKPNEADKAGIAPPSTVIETEEDEDVYRPTVRSWGMFPRPQNISKAYGGGRNIRLGGETQSAEEKAAKDKRTKELIAAYRNRQNMVIDAKTKAECIKALREGDEMMNTGRLKQALPYYEKVMDAVDFKTEFHGRAALQWSICLDSLCRSKEAMSMYSKLKNHPNSEISKKANMQWIS

SEQ ID NO: 71205 - protein, 64 aa, Zea Mays
MSCPMVKVWQRRLCVARRLMMSWPPYSNIWSINCDKLSCVDIASLGNWAVMDFSAGTLTSKTYV

SEQ ID NO: 71206 - protein, 104 aa, Zea Mays
MPFIDERSEEDYTTASKSEERMKRKRLAAAAKLEDGFPVVMRAGVAPQVSQPPITNNITYQIMDRTRGLNFLTGLVKRAPVEFLMTATEILARSRRKENLNTML

SEQ ID NO: 71207 - protein, 264 aa, Zea Mays
MARQTSVTEADLEFMLIDENAKPKPLPYSLLEKITNGFSGAHIIGYGGSADVYEGFIGNHKIAVKRLRIPYQHEKEFSQEIECLMKVKHINVVRFIGYCSDTQGQAEKYEDNHVMADSQERLICFEFLPACLDKYIKDPSCSLEWRQRYQIINGVCQGLHQLHEHEILHLDLNPRNILLDDDMVPKISDFGISKCLKKNQGHFYTETISGTPIYMSPERGKHGPITTKSDLFSLGVTVIEIMTGNKENIDQATVEDVYAWDLGT

SEQ ID NO: 71208 - protein, 529 aa, Zea Mays
MSNVVALKLMDGALIGRRYESSAAAVDSTDQLAEKHEYQAEVNRLMDLIVHSLYSNKEVFLRELVSNASDALDKLRYLSVTDPELLKDGPQLDIRIQSDKDNGVITITDSGIGMTKQELIDSLGTIASSGTAKFLKALKESQEAGMDNNLIGQFGVGFYSTFLVSEKVVVSTKSPKSDKQYVWEGQADSGSYTIREEKDPEKLIPRGTRLTLYLKHDDKGFAHPERIQKLLKNYSQFVSFPIYTWQEKGFTKEVEVDEDPAEAKKGDDDIKTEPKKKTKTVVEKYWDWELSNETQPIWLRNPKEVSTEEYNEFYKKTFNEYLNPLASSHFTTEGEVEFRSILYVPATRKDDITDNRKTKNIRLYVKRVFISDDFDGELFPRYLSFVKGVVDSNDLPLNVSREILQESRIVRIMRKRLVRKAFDMVLGISCSENRDDYERFWENYGKILKLGAMEDKENHKRIAPLLRFFSSQSNDELISLDEYVENMKPEQKDIYFIAADSLSSAKNTPFLERLTEKEYEVIAMRKERR

SEQ ID NO: 71209 - protein, 512 aa, Zea Mays
MHDHTRARAWEATARKVQPVGRRRVSPMSAADDSETASSSSSSSSPAGDDADHVDRGLPNGDFYTGQWRGGAPHGNGKYLWTDGCMYEGEWRHGKATGRGKFSWPSGATYEGEFKDGFMDGSGTYTGAAGDTYRGSWSANLKHGDGNKSYANGDQYDGEWRAGLQDGAGRYTWRNGTEYTGQWRAGLIHGRGALAWSNGNRYDGGWEDGSPRGQGTFRWADGSVYVGYWTRDAHTGIVQQKGVYYPSPAASSPTARDPRDVFARDLPGFLGAGPDTASPRKSRASSGTRAPNGRPSSVSGLSNSSGGDRKYDKICIWESDGDITCDIVDGPALGDEAVTAQRSVRTDDGGGDDRGLPPPSPAPHVTQWLPQRESKRQGETIAKGHKHYELMLNLQLGIRHAVGKQGPIVLDLKSSAFDPKEKVWTKFPPEGSKCTPPHNSCDFRWKDYCPKVFRTLRKLFKVDAADYMLSLCGNEALRELSSPGKSGSFFYLTNDDRYMIKTMKKSEVKHIR

SEQ ID NO: 71210 - protein, 433 aa, Zea Mays
MSGAQLFIRQDLGLSDVQVEVLTGSMNLFMLVSILGAGWAADLLGRRGTLVLANAFLMAGALAMSAGGSYAALVAARFVTSVGVGFARVVAPVYNAEISPASTRGVLSSLLDMFINVGILLSYVSNYAFAGLPVHTGWRVMFAVGALPPVFLAAGVLAMPESPRWLVMRGRYGEARAVLLRTTPAEADLRLQEIKEAVEAPRAPADSGGGGGVGVWKEMLWRPTKTVRRILVCAIGVLFFQQASGIDAIVLYSPLVFQKSGMSSNSAILGATVAVGVVKTCFILVATLLSDCVGRRPLLLASAAGSAATLASVALTLCVGSTSTVSTAACVASVLAFVAAFSVGFGPLAPTYSSEIIPLRLRAQGTGLGTAVNRLTCALVTMTFISLADWLTMPGCFFLYAGVAAAAFVFVYLELPETSGRSLEDMHELFAAK

SEQ ID NO: 71211 - protein, 1168 aa, Zea Mays
MEYWKHLLGRVQSERSTILKEVGTRHTPQSSMLSFTPTMSGDGSGWTTLKDGGDSKTVALPQTNVQQKIFANQYTVCSAEQTEKNVDVCKQALSAQNNIHNAPRNGASGPFVASPVSHQNGSIGTGMSNIAQAQPAHSIYRPDLSTVSAKSESFRSSLQGKLHLQMCTERPGNMSCGKAAKLSSFKPQAYMNLYNHGNIAASAAANLAIIASSEGKVSTSQLSAKPKKKVAADNALQLKAFSSAVAQFVWPSTEKKLMEVPRDRCGWCLACRSSASGNKKACFLNMTTSNAAKSSARVLSTMRVIKISDSHFPSIAAYLANMEESLRGLLVGSLQDMQQRERWREQLEEASNCRTVIPLLLELESNIRGVAFSASWFKPIDDWPAESPCPSTGASRPAQHQKRGAGGRRGRRRLLVSEPGTVTDDDNSWTWWTGGNIIKRTLQRGALLHSTIRKAARQGGKKRLAGLSYHEGSNFPRRSRQLFWRACVGLSQTSSQLALQVRYLDAHIRWKEFISPDQIPSDGKSSDADFSALRNAVLCDKKIIDNKIRYALKFPNQKHLPVRLTKNILEAESDQDEIRKMWFSENHVPLYMLREFEQHAEASSLPTPGIPECFTNLYPRRVKAPDRDVFSYLFHKGEVYPCASCKKGVLYRDIVKCSSCQGNCHKECTSRSVVSKGGSTTSSLICKLCLQKRNLMLTSYNTNASYIQHLQKNNGQQPVTAPRNVSKVSSSHSAEPAPKVEAEPVTKVKAQRVGNVEATTQPVLNVKAQPPAKVVTQNITSVQKTKAKKSKSEKPTKAKKVQAITYFGLIWKKNKNDKDDGSEFRANDVILKSKDGIGSSIKPKCCLCDKAYSPEFLYVRCERCKNWFHGDSLQLEEDRIGELVGYRCCRCRRRAIPPCPHSDNYVKPEPEFSEQTVATSSVSTMLSSGKTSASADQDPLLASYGIVEPIGEETGDVDLSANTASIAPGSSQKLSIRRALAKTSGYLDQAGKSVNEYYVQNQNTPPGNGNINFSHTNEISFSEADSVGASGLLGWDFSRGTAYAAPPGFTSNRQQNRTSRGSFVPDECEREPQTYFSFTELLEADDAQLDDNAFGIATGLQGDANGSGSFVQRGVGFGGTSFMAEDGASNMNVPTNGPTPEEVACHNGTNTQPPPDPRCSVRDLRTHR

SEQ ID NO: 71212 - protein, 62 aa, Zea Mays
MLREWQRRSWMVLSSLRGRTGARTSCAEVTLSSVLRWWLPLVRLPLAEVVASATGIIRATCH

SEQ ID NO: 71213 - protein, 67 aa, Zea Mays
MNIHYCIWLYIANEEEVEVEEERTSSPPPPEEHQAGSCFYFDICGSEPESPVTQGKPWCICHLLVPF

SEQ ID NO: 71214 - protein, 178 aa, Zea Mays
MFDAIICDPPYGVRAGGRKSGGRKLIKGVKGPYTVPDEKRDNHIPSTAPYSLAECVHDLLHLAARMVVMGGRLVFFYPVLRGEDGTANPQFPEHPCFKLITSSEQILSFRYSRVLLTMVKVAPYTEEIEKLAAERHREFRENHQKWMEEGNLHSAVFEPAQDGKPDRDSKPKYRGKYV

SEQ ID NO: 71215 - protein, 216 aa, Zea Mays
MSVSSPAMASPPLAAPGTHRGPCFSTLCRLPSPSCYPPLSASSSPAISTVSAFAVLKHKPRGLGLRCQAAEEAPPPARGKTSLKVMISGAPASGKGTQCRMIVEKYGLVHISTGDLLRAEVSSGTEIGKKAKEYMDNGKLVPDQVVTDMVVSRLSQPDIQERGWLLDGYPRSFSQAQHLENLKIRPNIFIVLEMCWKTAGSCDWQDLPFKKLPPGE

SEQ ID NO: 71216 - protein, 415 aa, Zea Mays
MDDEDDVKNSARKAAETVLLVIDEEGVETLIPELLRGITDSQASMRRGSAYLIGFLFKNTKLYLADEASDMMSTLIILLSDTDKATVSAALEAFSRVVASVPKEQLPTHIKLVRDAVSTARDKERRRRKGVPILLPGLCLSKALQPFLPIFQQGLISGSAETKEQAAEGLGELIDVTSEKTLKEVVVPITGPLIRILGDRFPWQVKSAILSTLTIIIMKGGIALKPFLPQLQTTFVKCLQDNNKSVRTRAAAALGKLSALSTRVDPLVSDLLSMLQSGDESVKESVLSALKGVIKHAGKSVSAPIRSRGCALLEDLLQAEADDIRSCAAKVIGTLSQYMDDREIPDLVQILLEVGTSSDWCTRHGALLALSSISMHSPSKLCDLASFPSLVDLLKDSLKDDKFPVREVATRTLEG

SEQ ID NO: 71217 - protein, 63 aa, Zea Mays
MLLCSILLETFISLFWFKYPRIKHIFGSWLHGVHPKAKNLIITIVVALCWVIWITWINLVFNI

SEQ ID NO: 71218 - protein, 287 aa, Zea Mays
MAGDALIVIVTSFLLALPSATAIGKVCGNAGNYTANGRYRSNLDSLAAALPANTSSSPQLFANATAGQAPDAVYALALCRGDLTGNLTGCSACVNGSLQYARRACPYAKAASVYDDNCLIGYSSANILVPAYNATRDTSTLFDYWNSMTIAGNGTLVAAHVDDLLTQTAQQAASSPRRFVTAYMDGSSNAVIPTLYSLAQCTPDLSAGDCLACLQRILGLLNATTSVSLGGRVLLLRCNFRFENNMFFDGAQMTQIRPSSGAPAPPPPSPTTNKGMCGQVRAIFIMN

SEQ ID NO: 71219 - protein, 97 aa, Zea Mays
MRMTQSSAQGARTASSDHRVELEEDDRTTTCTRRPWNERDTELGAAWGSRHGELDRAPDQGEQGRRRAEARAAKRTEGRGDIEERSVRGKQGTLNWS

SEQ ID NO: 71220 - protein, 153 aa, Zea Mays
MWSAHTAAGCSVPSVRFHDTLVSLAQSSSSNDRGRMSRAERTYCRGRLNKRASGKVPRVQDICGEDQGLCIYHLRGQPLLQNLQSNLGNALKSPSSLLEGKKLILTNIICVLLVHFQKQLPFIKNRLTRLYIRKSRLQAEHILTYKANHKWAS

SEQ ID NO: 71221 - protein, 213 aa, Zea Mays
MYEDASQVAVDAVGSIRTVASFCAEKIVVAAYRDKCEALRKQGIRNGVIGGLGYGFSFLMLFFTYGLCFYVGAQFVRQGKTTFPDVFKVFFALVLAAIGVSQASALASDATKARDSAISIFSVLDRESKIDSSSGDGMTLEDVSGKIDFRNVSFKYPLCLDVQIFSDFTLRIPSGKTVALVRESGSGKSTIIALLERLYDPDSVSQWVKLWFD

SEQ ID NO: 71222 - protein, 799 aa, Zea Mays
MKSPPVMDPEAPPAGTPPDDEEEKRGGRKGVPWRMTLSLAYQSLGVVYGDLSTSPLYVYKAAFAEDIQHTESNEEILGVLSFVFWTLTLVPLLKYVCVVLRADDHGEGGTFALYSLLCRHARAALLPPGRTAAWDEDQFSDGAGGGTNKATAQNGNAVTLGGGAAASVRRLLERHKVLQRVLLVLALVGTCMVIGDGVLTPAISVFSAVSGLELSMAKEHHKYVELPIACIILVCLFALQHYGTHRVGFIFAPVVITWLLCITLIGVYNIIHWEPTVYRALSPYYMYKFLRKTQRGGWMSLGGILLCVTGSEAMFADLGHFNQLSIQIAFTCMVYPALILAYMGQAAYLCKHHIMESDYRIGFYVSVPVVGSQAVITGTFSMIKQCASLGCFPRVKIIHTSAKVHGQIYIPEINWIMMILCLAVTIGFRNTKHLGNASGLAIITVMLVTTCLMSLVIVLCWHKSIFLAIGFILFFGTIEALYFSAALIKFREGAWVPIVLALIFILIMCVWHYGTIKKYEFDVQSKVSINWLLGLSPNLGIVRVRGIGLIHTELETGIPAIFSHFVTNLPAFHQVLIFMCIKNVPIPHVRPEERFLVGRIGPKQYRIYRCIVRYGYQDFHKDDVEFEKELVCSVAEFIRSGSSKLNGTAEEVDEEEEQRMAVVRSNSVRMLEEEATVQNTVGVGPSSRASREIQSPSPAPATGVGPKNKKRVRFVLPAASPKPDAGAQEELQELSDAREAGMAFILGRSHVKAKSGSGFLRRLVINFCYDFLRRNSRGPRYAVTVPHASTLEVGMVYFI

SEQ ID NO: 71223 - protein, 208 aa, Zea Mays
MADAYWRYAAAAPRQQQQQQQPPPSAGGGVAHPGMGGGAPQMAPAGGQQQPMKRPRPTEFSDVPGAPDTAGYYPRDEERAGYRAARDTESLNASYERFLRTGQIQSFGGGHAGEPIRPAVGGNAAYPVDDRSMMAARGMDSRNIGFVGGMPEPPLPPDASNTLYIEGVPSDCTRREVSHIFRPFVGFREFARFAGPKGNSGPGGRGRR

SEQ ID NO: 71224 - protein, 391 aa, Zea Mays
MEVTQSTDFTELANQEPWLSSMKLVVKPDMLFGKRGKSGLVALNLDLAQVRQFVKERLGVEVEMGGCKAPITTFIVEPFVPHDQEYYLSIVSERLGNTISFSECGGIEIEENWDKVKTIFLPTEKQMTPDACAPLIATLPLEVRTKIGGFIRAVFSVFQDLDFSFLEMNPFTLVNGEPYPLDMRGELDDTAAFKNFNKWGNIVFPLPFGRVLSPSESFIHELDEKTSASLKFTVLNPKGRIWTMVAGGGASVIYADTVGDLGYASELGNYAEYSGAPKEEEVLQYARVLLDCATSDPDGRKRALLIGGGIANFTDVASTFSGIIRALREKESKLKAARMNIYVRRGGPNYQTGLAKMRTLGAELGVPIEVYGPEATMTGICKEAIDCIMAA

SEQ ID NO: 71225 - protein, 92 aa, Zea Mays
MVLICILTLPLLVSGTILSIVSGAATGEASVVIALAVLLLLRLLQIVVPLSWGLRAVGCLLLLLWSDHPSSLLLLGSSALSVGHKPEALRQC

SEQ ID NO: 71226 - protein, 87 aa, Zea Mays
MKNTTMWCLPLLHRRILSHLGRHTRNSSILRAGWLCCMEDPSHRLMLLPVEVVVVLVRVAGVAMAGLILVAAATAMHQEGADLMGTQ

SEQ ID NO: 71227 - protein, 51 aa, Zea Mays
MDKLCKQVEKSSKYYEFQHNTRSVKPSILHFQRFLTSLGTLLRWRSILAVC

SEQ ID NO: 71228 - protein, 75 aa, Zea Mays
MADSPCSSPSRRPQPSSLLTTSDVVVDRPVPVHHDHDLALAPCYARPARPQAPARVHGRVRRVCQSSVMSAELYL

SEQ ID NO: 71229 - protein, 273 aa, Zea Mays
MYRMDCVKVDTLMSGEIDCADFQRKLLQNRDKPAIINVNIGTTVKGAVDDLDLVIKTLEENGFKGRFYIHCDGALFGLMIPFVKKAPQVTFKKPIGSVSVSGHKFVGCPMPCGVQITRLEHINALSSNVEYLASRDATIMGSRNGHAPIFLWYTLNRKGYRGFQKEVQKCLRNAHYLKDRLKEAGIGAMLNELSSTVVFERPKDEEFVRRWQLACEGNIAHVVVMPSVNIDKLDYFLNELVEKRATWYQDGISQPPCIARDVGVESCLCGLHK

SEQ ID NO: 71230 - protein, 488 aa, Zea Mays
MAAVALSLGSGSGGRRRRSCRAARRGDGGGAGAGAGCRHFHVHYQYHIPRQAVWASSPPAVAPVRYLLILPVIFLAALAFLVCFGWLTLVYLASSSLWSRSVDRAGDASGFAGEDEREERPVMPVTDTEHAAGRSGVSGVCAGEGKTEIGEAGDGISEERRYVSTMVSTGICFSDDERASDEKIVKEVMVFEPCKAKAFAELDGSSEEEEHQLLLMDIPIDCFLEEVINTRQFSISLSNATKLLDALSVGEVIAADTKEVSDLSSTEIWKFVDRHDTAAEKIPVHGAGADFVIPEATYSADSTLHGLEDEYESEIKQEQSLAELSADTVPGNVTDEWQETQTSVTEHNNKQAEPEAASSEGYRKQVVGVSDESHDSVRENISENEAASNAPFHQTNSDEDTELQEGLFPNKRAEASTSASAVCDFADNHWRTAEELAGSADEGNVHGEGRTSVLETAQDGDEDRDNHVSMVAARSEVPSTVVELLWSS

SEQ ID NO: 71231 - protein, 147 aa, Zea Mays
MAIARTGVYVDDYLEYSSTLAGDLQRILSTMRELDDRAHGIMGQTKEQIKYILGVSSHGYDRSNMDDDESERMKKDIEASQDNALNLCTEKVLLARQAYDLIESHIKRLDEDLGQFAEDLKHEGKIPPDEPTVLPPVPVVSRDEKRR

SEQ ID NO: 71232 - protein, 632 aa, Zea Mays
MDPSQTSIQDGKTLHPYDRASEKLFSAIEAGRLPGDIFDEIPSKYYNGSVVCEIHDYRKHVSNQAPASSAELGSPIVNKVRLRMTFENVVKDITLLSDDSWSYRDFMEAEACILRALQPELCLDPTPKLDRLHQDPVPHKLSLGIGKKRRLRQNPEVVTSSHMSHGKKVCIDRLPESAKADEMGITSSNAAQQVGGNITIQNMSVSGGSQTLRPNNSSQDAARTLLPQSGLQQTLCYSAAGNDHMAGPPANFSGTSSCISSHQSLIGYSDSVAANSLLSVKREMQDASLQDPKRIKRTGGIDDVQQQQIRPQPLGGQEMQWKNHQLHPQLDVKGMQYASSLSGQRYPSSMMNNMQDPGSSLYFSHQQNLRYDAKQEQMDGSDKSKDTLQSMAPETSMLDQQQSQSQHLPQQSVARNNVPNMGQWQNTRFAAEKDFKKEDIIQRRKLAPSSRAPTGPVIQSPVSSKSGELSGSSMGGQFGSAVTSAVTGVQKDKFAANSGTAVGFPSVASSPSDSMHRIQQPAVASSKRKTNSVPKTQPPVSAVGSPASVSNMHALLNASSPSIGTTPMGDQAILDKFVKIDNISHRYSIISTSAPSLHEFLLSLSFLFLVSLEVCHGRLFKEVLGCTVPAFQ

SEQ ID NO: 71233 - protein, 377 aa, Zea Mays
MDGEEAPLGALNLAEYAPAGARTVDCYRRIRKIGEGTYGEVFEAVDIITGERAALKKIKLDDGKEGFPRQILREIKLLKKLDHENIIRLKEIVVSPGSAHGTGGSDDHIYRGDIYMVFEYMDHDLKKVLHHSAPSQVKVYMGQLLKGLQYCHANNVLHRDIKGANLLITGGKLLKLADFGLARLFTRDGTLTNHVITLWYRPPELLLGATSYAEPVDIWSVGCIFAEFLLKKPLFPGRTEQEQLSKIFELCGSPNEESWPGVSKLPLYKTMTIRPATPTKRSLRDILQNFDCPAVELIERMLILNPSQDFCTRCSWMGLGISNWCKYYLKTESLVSPADIGFRTSKQFNFLCSSFKHNIYRCIVHYYSWGKMYLIIN

SEQ ID NO: 71234 - protein, 62 aa, Zea Mays
MCTHPCFTTKHQVVHIVTTAQEKMKPWKETSRSSKTTTSSKCGLAATLSQLPVKALSLLCFA

SEQ ID NO: 71235 - protein, 548 aa, Zea Mays
MIPGNHDWFDGLNTFIRYICHKSWVGGWFLPQKKSYFALKLPNGWWVFGLDQALHGDIDVYQFKFFAELCQQKVGESDSVIIITHEPNWLLDWYWGDSTGTNVAYLIREYLRGRCKLRMAGDLHHYMRHSCIESKEPVHVQHLLVNGCGGAFLHPTHVFENFRVFYGNKYETKSTYPSYHDSSKIALGNILKFRRKNWQFDVIGGFVYFVLVFSMFPQCDSFHILHEDSWAGRINGFFTAMWNAVFEILERSYVSLGGVVTLLMVSFFFVPTKLSRRRRVLLGFLHAAAHLTSAVLLMLLMELAIEICIRNHLLATSGYHTLYEWYRKVESEHFPDPTGLRARLEHWTFGLYPACIKYLMSAFDIPEVMAVTRSTICKKGIESLPRGGAIIYYVCVFLYFWVLSTPVVSLVFGSYLYLCINWFHIHFDEAFSSLRIANYKAFTRLHIKKNGDLEVFTLAVDKVPKDWMLDPDWDMEPKQPFQMSYTRKFPSKWRAASGLDPINAVRIVDRFVIPRTPSSPTTPGGSVSSPTTPGGSVSSPTTPGGFMR

SEQ ID NO: 71236 - protein, 52 aa, Zea Mays
MGHLGSLEPNTIKTNRCVLLCSYLCCDLFFPLLPLGSLVLMSYSKSLGFLFK

SEQ ID NO: 71237 - protein, 81 aa, Zea Mays
MDLGIRFSKRVRAGEDTKGKQLDRMTKVMQRRLSIAVEEGKKRPHEPVQAAKFASEAGIIIRETMPILTRWKDYKDDQKYY

SEQ ID NO: 71238 - protein, 52 aa, Zea Mays
MNDQRDQMQHIIGVYKMIIKGKCVRLTNLPSQIFPLTRLNREKIRLIYRLQV

SEQ ID NO: 71239 - protein, 69 aa, Zea Mays
MLCVYVCVCVSKRNRRFLRREESRVARARCLMEWMNQRSLLLLRNPSLFSVGTLIDHVMWRTRAGLIPR

SEQ ID NO: 71240 - protein, 390 aa, Zea Mays
MEMRGLVLVLVMVMVMAPLPSCKAADHDFGTVVGVAIGVTRWLRRKAKETTATESPAAKLSSQSSQGGHRQVAAVAAHAHAHGSGTEASGRWSGLYRFTREEIERAVDYASSRIYLGSGSAGQVYQGVLPSGQLVAVKHIHRTAMSGSFTREVEQLCKVRHPNLVCLFGYCDEEGDQYLVYEYCANGNLAQNLLRSDSVLPWETRVKILRDCASVLRFLHTHPDGCIVHRDIKLTNILLTEKKVPKLSDFGLAKMLEMEETKVFTDVRGTIGYMDPEYITHSKLTCASDIYSFGVVTLQLLSGRKVIELDIVARDSLTKKAKDVVSGKKPLEEFIDPRVRDDVVIEDFVLILKIAVLCVASSSVGRPTIKDVFEEMDRALRSTAVKSQSG

SEQ ID NO: 71241 - protein, 127 aa, Zea Mays
MSKFFESDDSGSSVVWTEESSDEDLDYFAALDVAAAEASPRVMDAEVLPGPSAGRRRRREVAKRRVSEVESGHLRVDGAGKQELLSSPVWASVGEGELRNLFEGEELRIMLFNYREMGIIPKVEPMY

SEQ ID NO: 71242 - protein, 216 aa, Zea Mays
MYDSIFYVGTAYIYVGAAPTSAPGRRLGGTCTQGSSSDVVAVRRASAVACPAPPRMPARSVSRSTHTEWPVFKVVLILSSWLNETINVWMFIDLLGFMLFFDLTLVHLGQYFTKVSGMIGHLSCHCSLRPQLRRPSSNQGRLALAPRTHDPLLLYPQRRAPPSCFWQRKPSPCGKLPTRWNAQPLVGSTQPLRDVTNSGETSLPLLLSSPLCLIKC

SEQ ID NO: 71243 - protein, 432 aa, Zea Mays
MAVDHPYHTIFQLLALANGDRVKDKQRSRSSFVVDMEKKLAAENLLKELSSCHGPLICQMKQMVEIYIKLAELETKKEDTNKKIPLPREARSIGQLELVPVVTATVPIDPSCRYEEGSFPHFTGLADSIMIMNGINAPKVIECFGSDGNKYRQLAKSGNDDLRQDAVMEQFFSLVNTFLQNHRDTSKRRLKIRTYKVVPFTPSAGVVEWVNGTVPLGDYLIGSTRSGGAHGRYGIGDWTYLQCREYLMSVGYIVGLGDRHSMNILIDQDTAEVVHIDLGVAFEQGLMLKTPERVPFRLTRDIIDGMGVTGVEGVFRRCCEKTLCVMRANKEALLTIIEVFVHDPLYKWALSPLKALQRQKETVDTDSCLDDSQEPYDGNKDAARAILRVKQKLDGYEDGEMRSVQGQVQQLIQDAVDVDRLCQMFPGWGPWL

SEQ ID NO: 71244 - protein, 277 aa, Zea Mays
MMFHSQQQQEMVSAKSGLYRTVNSGVETAAAAGAGGASSSDNASNLIRQSSSPAGFLDHLNMENGYGAMLRAGMATADSLAGGGSRLKGQLSFSSRQGSLMSQISEMDSEEVGGSSPEASGGGGRGYIPGYPMGSGWEDSSALLSDNLSGVKRPRDSSEPGQSGLTHQFSVPKTSSEMATIEKFLQFQDAVPCKIRAKRGCATHPRSIAERVRRTKISERIRKLQELVPNMDKQTNTSDMLDLAVDYIKDLQKQVKVLKESQDNCTCSASKNQQHSC

SEQ ID NO: 71245 - protein, 107 aa, Zea Mays
MAWTTAATVCWRLLHLPSARCPLSSRARCSAAQSPDAVDKEYADLNLRPLYPNRGHHMRIRQHVNPLSSSFSEPTGPPEWKEVFDDPLLPLMVDIGCVGGAGTVLGE

SEQ ID NO: 71246 - protein, 557 aa, Zea Mays
MAASFPTTTALSVILLLSLFVAVVRSDTAATPVTPSTACNGTTDPNFCRSVLPSNGTSSLYTYGRFSVAKSLANANKFLGLVNRYLARGGLSPGAVAALQDCQLLSGLNIDFLSAAGATLNTSANSTLLDPQSEDLQTLMSAILTNQQTCADGLQAAASAWSVRNGLAVPMVNSTKLYSVSLSLFTRAWVRSSKANKPPRHGGHGRVLFDAIDDEMVRRMALEGVAAAVSVVGEVTVDQSGAGNYTTIGAAVAAAPSNLGGSSGYFVVRVPAGVYQENVVVPKNKKYVMMVGDGIGQSVVTGNRSVVDGWTTFNSATIAVLGTGFVAVNMTFRNTAGPAKHQAVALRSGADLSTFYQCSFEAYQDTLYAHSLRQFYRGCDIYGTVDYVFGNAAVVFQDCNLYSRLPMQGQSNTVTAQGRTDPNQNTGTTMQGCTVAAAPDLAANTAFPVTTYLGPALEALLAHGDHAVGGGHAGRPRRLDAVGRRLRAQHALLRRVQQLRRRRGHEQEGGLAGLPRAQQHRGCRQLYRRQHGARGLLAAPNRRAFHQRTHQLMIDDG

SEQ ID NO: 71247 - protein, 64 aa, Zea Mays
MYIIRHQLQESKGILHQACPRGTKESYIGGLILKDDGEGRQTCKNLKTQPQKHIHSSTPHLIQI

SEQ ID NO: 71248 - protein, 107 aa, Zea Mays
MGKNISLILSSPSIQHAPPLLDPCCVGGDLEGGGSHGEGRGRLPTGRRARERGGGCNPIGEKVRGRLGLGRRGGAPIHRIKINGPNSLSPLSSQSPVEKNAKRSTVF

SEQ ID NO: 71249 - protein, 178 aa, Zea Mays
MRGTTSTTGAVDALQLGLYRRGEAAQAWCATRQSPRHCAKEEIHPARVLDGVHGEDEAGSSPQGQQRAQLEDGELPTVGRGFGRARTRGSTAARRSCSAASKDPSTGARTREKQRRSASTARSERPEFLSRPNTEGSTNPRHDGGHSQAEGRGCAQRSSATSFPVCHARLKLLCGGAS

SEQ ID NO: 71250 - protein, 493 aa, Zea Mays
MIRQDISLLHGLGIKFVLVPGTHVQIDKLLAERGKKAKYAGRYRITDSDSLDAAMEAAGRIRLTIEAKLSPGPPMLNLRRHGVNGRWHEISDNVASGNFLGAKRRGVVGGIDYGFTGEVKKIDVSRIRERLDRDSIVVVSNMGYSSAGEVLNCNTYEVATACALSIEADKLICIVDGQIFDEHGRVNRFMSIEEADMLIRTRAKQSEIAANYVKVVDEEDINHVRCLPMKHGTEHGMNGRDHINGYTASFRNGVGFNDGNGLSGEQGFAIGGEERLSRSNGYLSELAAAAYVCHGGVQRVHIIDGTVGGALLLELFTRDGVGTMIARDMYEGTRMAREEDLSGIRKIIRPLEESGVLVRRTDQELLEALTSFIVVERDGSIIACAALFPFLEDKSGEVAAIAVSEECRGQGQGDKLLDYVEKKALSLGLEKLFLLTTRTADWFVRRGFKECSFDSLPLVRRKRIDLSRGSKYYMKWLQAAEVGHMAADGFAMR

SEQ ID NO: 71251 - protein, 265 aa, Zea Mays
MDAAAAASLLPRAAASSLLPRRVLSPLHVSRSGLLPRQSSFLAARCAHSRAPPPHPPLPRADCDDAAAKAHPRLRLRLLAEEFRALPSDADRARRLLSLAAALPRLPEPDRAQGNRVMGCVARVWLVARCNASTGWRMWFSADSDSDLSRGYCACLVAALDGAKPEDVLAVDPADPDLAPLGAGTTAAWSRASTWHNVLVGMQKRARTAIAAREGRHPGKPFPSLVIARDGAVSAQGSYAEAQTLVSLRIGNEPASVNISLIFPL

SEQ ID NO: 71252 - protein, 630 aa, Zea Mays
MSAKHKEGDLVYVSGKIKKVLANGHYELKEYTIDAIEGEGEHSTMLARKPHPIYPSKAGLKPSLLGLSISRALKILSPDVDPVPPDVLVEFNLPNLFDAYMGIHKPKDRSEADFARRRLIFDDFFYLQLGRLFQMLEAVGTRVEKEELLYKCKSHELNTVGVDDWSPLTKKLLRALPYWLTPSQLDAVQEIIWDLRRPVPMNRLLQGDVGCGKTIVAFLACMEVVNSGFQAAFMVPTEVLAVQHYEHLTSLLEKFDGDEKPNIALLTGSTSTRESRIIRDGLKTGEIGMVIGTHCLIADKTEFSALRISVIDEQQRFGVVQRGRFNSKLYTSSSKLSGENTSSDEASDSETFMAPHVLAMSATPIPRTLALALYGDMSLTQITDLPPGRQPIKTLALEGNDVGFEAVFQMMRDELIDGGKVYLVYPIIDESEHLPQLRAATAGFDSIKQKFEGYPCGLLHGRMRSDEKEETLNSFRSGETRILLSTQVIEIGVDVPDASMMVVMNAERFGISQLHQLRGRVGRGERKSRCIFLASTSSTLPRLKVLEKSSDGFYLANADLLLRGPGNLLGKKQSGHLPEFPIARLEVDGGILQEAHLAALKVLVASNDLALYPRLKVELSMRQPLCILGD

SEQ ID NO: 71253 - protein, 55 aa, Zea Mays
MSQVTASERDEEDAVRRVQLGRITDRMVRAEMFDGGMHQRQRREEAGSKLHWPRS

SEQ ID NO: 71254 - protein, 805 aa, Zea Mays
MQDHCAQNFEEQMGKLKEKIYINNLRSLMIFGKYIMLHLLNILRDTFKEIRRLRVLSIFIYSHSSLPNNFSELLHLRYLKLLSPYYSEMSLPNTVSRFYHLKFLDLEQWGSDRSLPKDISRLENLCHFVVSEKIDSNVPEVGKMIFLQELKEFHVNKESVGFELQELGKLDELGGKLNIYGLENVRTKKEAKEAKLMSKRNLVELGLIWNMKQESTEDDILDSIQPHSNVRSLFIVNHGGTLGPSWLCSSDTIYMKNLETLHLESVSWANLPPIGQFYHLRELRLSKIVGISQIGPGFFDSTTEKSVSHLKAVEFNDMPELVEWVGGANWNLFSGIERIKCTNCPRLTGLLLCLPPLPHTSKVSRIHMGDFSYEGRTMLKINNPSRFAFENLGDLETLVAWDALPLSFMDLKKLHSLRRINVTRCEETFLRGLDDGVVLPTVQSLYLGRFTPTKNYLSKLFKCFPALSSLHVMASPSDEDNEEVVLHFPPSSSLRDVNFTGCKNLILPMEEGAGFCGLSSLESVTIHKCDRLFSRWSIGGRATQTQSIINPLPPYLRKLFLSYMETLPQEALLMNLTSLEKLTLCNCLGCEQSTERMAVLANLTSLTTLYLYNCRNITMDGFNPHITSSLKYLCVYNERNDGTDPYSVAADLLVAVVRTKTMPDVSFKLVGLYVDNISGVLVAPICKLLSATLETLNFSNDWRTENFTKEQDEALQLLTSLQFLEFYNCRALQSLPQGLHRLPSLHGITIYGPQNIRSLPKEGLPDSLRILRITNCCAEIYEACQQLKGTRPDINVLASKARVQN

SEQ ID NO: 71255 - protein, 77 aa, Zea Mays
MHNNGSNCRRGTQQGRDAELPDALPPTWSYLGTNAELLEKLLSSCMCFVGDGCSIEISSIEINNGRDRAMCLRHSNR

SEQ ID NO: 71256 - protein, 68 aa, Zea Mays
MAPFEALYGRRCRTPLNWSETGERYFFRPDMVKDTEEKGSTNNTSFEESSSSLKELRRHTPDTLILSR

SEQ ID NO: 71257 - protein, 1229 aa, Zea Mays
MSLTAAPVAFIGLDELSVELAASFLRSGACVRSFTPEAERSPSAALAELNGLLQCASPVEAARDAALVVVLSDAGGVDELFFGVEGIAKGLCAGSIVLIHSTLLPSQLEKLEQELTDQKKDVFLLDGYIFTGLSDELKQQIIIVASGRQDIAEKASKFFHGLYKTIYFAEGEFCTSRKIRMVNDLLEGIHFVASIEAMYLGVRAGIHPTIIYDIISNAAGSSRIFVELVPKLLSEDPLLIDFLKSTRKKASHVMDMSKSVTFPLPLLGVAYQQLVHGSSAVTGDGSASPLKVWEASFGVNIVDAAGEQIYDASKLADQLVAESKAAKRIGFIGLGAMGFGMASHLLKSGFCVVAYDVYKPTMARFADLGGSTKGSPEEIAKDVEILIIMVANESQADSVLFGNAGAVPVLSAGTSVILSSTVSPGFVIHLNRRLEAECRQIKLVDAPVSGGVKRAADGTLTIMTSGTDEALHCTGSVLSALSEKLYVIKGGCGAASSVKMVNQLLAGVHIASAAEAMSFAARLNLRTRRVFEIMQHARGYSWMFGNRVPHMLDNDYTPYSAVDIFVKDLGIVSCESSNSRIPVHVSSIAHQLFISGSASGWGRYDDAAVVKVYETLTGVKVEGKAPMLSKEDVLQSLPSEWPEDPIDNLVPIASHSSKKFLVVLDDDPTGTQTVHDIEVLTEWPVEALVEQFLKLPTCFFILTNSRSMTADKAMLLVQTICKNLKAAAEKVPGVSYTIVLRGDSTLRGHFPEEADAAVSVLGEMDAWIICPFFLQGGRYTINDIHYVADSDRLIPAGETEFAKDAVFGYKSSNLRQWVEEKTKGRVLENQVSTISITLLRKQGPTAVCEHLCSLEKVSVEMVSMKSMEDRDQEIRRIVELGNAYIQSRKDTLILTSRQLITGKTPEESLEINYKVSSALVEIVRRIDSKPHYIIAKGGITSSDIATKALEAKRAKVMGQALAGVPLWQLGPESRFPGVPYIVFPGNVGDNSALAKVVKSWASPSRSSTKEILLNAEKGGYAVGAFNVYNLEGIEAVVAAAEAEKSPAILQIHPSALKQGGVPLVACCIAAAEQSSVPISVHYDHGISKSDLLQALEAGFDSVMVDGSHLTLGDNILYTKSISSLAHAKGLLVEAELGRLSGSEDGMTVEEYEARFTDVAQAEEFIDETSIDALAVCIGNVHGKYPPSGPNLKFDLLKDLRALTLKKGVSLVLHGASGLSHELVKPANKP

SEQ ID NO: 71258 - protein, 107 aa, Zea Mays
MSYNIVLSILAANKVSSVWKSRCLLLGEHASSIFVWLYQDVNLLMHCLLIFFHLHMQNNEMSGLNFYTKYWFAISCGHRKRTILLQVLVYQIMSLIHVSIIRILILG

SEQ ID NO: 71259 - protein, 130 aa, Zea Mays
MLRLETAPINYFPWMHNVKYRRDAFSNQTSTHLSAEIDKIMEHNISVIVPHQNLSNLCGRNRHLLDQFLNLWIRVMVLDGVVVVGKDLERLWGAIPHVDVHVHPSRPQQCRVKPLLVIGCEDDDPFFPTC

SEQ ID NO: 71260 - protein, 132 aa, Zea Mays
MPTSALGKTDCRGAAPREDARVKRHGWARRLEKKQLRCRKPEAAERQEGEVEGARLGRAPLEDWTELGGHGWSTAARDAMEKRSDWRVWEIEQRCAGLAGRPRQGEKTREPSSGWAAVRRGEQTRKAAERNN

SEQ ID NO: 71261 - protein, 254 aa, Zea Mays
MEVGNAVIDDYHDYMGTFEYWWTHGLISDETYAKLWEDCKNDVSENPSEECQKIYEVAEAEQGNIDLYSIYTPTCKKTSLQKRRLIRGRMPWLPRGYDPCTELYITKYCNLPEVQDAFHANVTGIPYAWVGCSDPIYEYWKDSPRSMLPIYRELISAGLRIWVFSGDTDSVVPLTATRYSIDALSLPTITKWYPWYYDEEVGGWCQVYEGLTLVTVRGAGHEVPLHRPPQGLKLFEHFLRGEPMPKPVESVQSF

SEQ ID NO: 71262 - protein, 243 aa, Zea Mays
MAFVVLRQSMSTVQCVLVASADAGVSTQMVRFATALSKESIVDVEGVVSLPKEPLKATTQQVEIQVRKIYCINRAIPTLPINLEDAARSEADFEKAELAGEKLVRVGQDTRLNYRAIDLRTPSNQAIFRIQCQVENKFREFLLSKDFVGIHTPKLISGSSEGGAAVFKLLYNGQPACLAQSPQLHKQMALCGGFERVFEVGPVFRAENSNTHRHLCEFVGLDAEMEIKEHYFEMAYLYQYLNT

SEQ ID NO: 71263 - protein, 435 aa, Zea Mays
MNFLESIAVNGHRDRQHGGVMSRQSMVAVEQLTGPASARPAHTCAAQPHAHQLLSARYDHRGACASQVELPDRISPSNASTFCTSMYSSSSSSSAAADSSKSCRRAGALPFLPHPPKREQQQQQQSSSSPSLLVCTDLGNGGQDEAEAEHPAELKDFLNLSGEASWRGGFHGESSGVAFRFGEQVEFQFLSEQLGIAITDHDESPRLDDIYDRPPQTSSCPVLSCSDQEEGLQRAGSPVKAQPSSSRAASCNNKPRLRWTLELHELFVKAVNKLGGPEKATPKGVLRLMKVEGLTIYHVKSHLQKYRFAKYLPETKEDMKSSSEDKISKSEMPGSNAGRKKSLQVAEALRMQMEVQKQLHEQLEVQRQLQVRIEEHAKYLHKILEQQKARNSLSATTSSIETELSESTKEEKPETQADTSSAQLPNKKNSDTDME

SEQ ID NO: 71264 - protein, 331 aa, Zea Mays
MDGHYIRQICSYMGLPYKVRLAKFIARKQWVIAGATSGFIFVYDYDSKKEIIHVLCNHTEPIKSLAIHGTEPLVLSASVDGKILLWDYANDWHLIKTFDARSQRLVQVAFNPKDTNMFASAQGKTVKIWDRQHDECQYKLDGHSHQIECFDYFSGGDFDKLYIVTGSQDKTAKIWDCENAGCVQTLEGHAGPVRAVCYHQNLSLLITGCSDGSIHLWNSTTFRLEHKLNFADFGLLSSVACLKGSKRIAIRSREGLALVDIDIEDKKDSDVESITTTASMNDTGPITEENGVAADHISDDHLAQGVVYVHTEIIGKVNSACTIDVHPTKPW

SEQ ID NO: 71265 - protein, 124 aa, Zea Mays
MGKSPPSRTDWCTGARAQPSALGDVPRFEGVVQRLWWGARLCAMENCSSESLRRRKPWAEPYVPRSMVRNVPQSSPSALHRSGSVRSKTIVLERGIHRSQRGATSRCLLRRCGWDLWRKTTSWP

SEQ ID NO: 71266 - protein, 733 aa, Zea Mays
MDFGIFPVGSLESRLAHFICQQCEASLQFLLLLCQQKLFRDRILRNKELSRNGGILSLSHTILKLAVPECLKQSTDLVASISRLKAKILSILLQLCEAESVSYLDEVATNSNSMRLGQTLALEVLNLLKIAFGKKKYITSDSHDKVKIYPMGSMLISALRLVDVFSDDSNFRSSFLTNTVPFLTQILATPHGEFVSSWCSVNLPAIEEDASLDYDPFVASEVALLASNNVLTEAKADYSCPFRPSLPSVAYAQTRTSCVVKIIANLHVFIPNICEEQERDLFLQNFQKYLVSGSSKLSADQPASSDFDATKVCRNLGSLSDYAKTLVPNLLNGEDLLLLSDFSDKLQSWCKSQVAVKVVQNDIPPESMEDMHPMQQPLPTRASTPDSKMNNFPKNMEVSAPIPPINREGNDKDETPKNTVSRNGGFLQNAVGQDLVHLGVARTASGGSSAVTSVVSTGHQRSKMDLDPASGSVDNFKTPELTKENGLQGDDKGESSVYDERQPKRRKRNIMNSEQIDELEKALVDEPEMHRNPVLLQGWSEKLSLQGPEITSSQLKNWLNNRKAKLARIAKERGTFEGDNADKPSTPHPGESSESAGEDNYIPPARVMTAPSKGRLVSPDGNEKTSQAELSPNTMLIRPFTRSFSLEPGRLVSLVDSDGKEVGRGKIFQAPGKSPAPVESRICTVDVTELRTEKWRELPHPSEASGRTFQEAEARNGGIMRVSWDSGRLLPVV

SEQ ID NO: 71267 - protein, 57 aa, Zea Mays
MLDKKLEQVFDRHPRLRQDPRRLGTEENKSVRGRRILDMDEDETRFDATLTLFSVKC

SEQ ID NO: 71268 - protein, 127 aa, Zea Mays
MKASPRRKRSLIPKDEVIPPLPNAPYHQGQNFHEKIVAKGILGVLNYREEVKLMIPMETHITSAVCTERTAKQQMKGNRCVFDNSRPCVEEVLKAVNVEGGLWCLAGASKLQELVFGSVPTGAFLAL

SEQ ID NO: 71269 - protein, 131 aa, Zea Mays
MYGQGPALFLGEFFPLPPLRPCRAAAAASTVRAKIRSSLSAIFGRRRQQDLREGFRVEMAGRKETALDLAKFVDKGVQVKLTGGRQVTGTLKGYDQLLNLVLDEAVENERDNSKSLLSRENLLGVLQSNEI

SEQ ID NO: 71270 - protein, 113 aa, Zea Mays
MGDGSCCVCKEAPPKYKCPSCRTPYCSVTCFKKHKEESCQKILHQEEISKSALQEEVTELKGIQDALRDPELQRMILQIDGSSESEKELEKVMEGQAFREFTDKILDIVNPQE

SEQ ID NO: 71271 - protein, 753 aa, Zea Mays
MGGACQQLSVDGDARTPANDRDPAGLLQHDDTENQQQQQACWERFLLKETLNVLLVESDDSTRQVVSALLRCCMYQVISAENGQQAWAYLEDKRNNIDLVLTEVFMPGVSGISLLSRIMSHNICKNIPVIMMSSSDAMSTVFKCLSKGAVDFLVKPIRKNELKNLWQHVWRQRCHSAQNSWTKLAVEIDSPQAMSLDQLADPANSTCAQVIHSKSEICSHRWLPGSSNRNCKKQKYTNDDFKGKDLEIDGPGNLYMDHQSSPNERPIKAADHENNSKESMMGNLGDATVRAADLIGSMAKNMDAQQAARAADTPNFSSEVPEGKDDFKGKDLEIGGPRNLYMDHQSSPNERPIKAADHENNSKESMIENLEEPTVRAADLIGSMAKNMDTQQAARAAEDTPNFSSKVPEGKGKNDQHDNYVLPSLELSLKRSRSCGDGANDTVNDDEQRNSALRRSNLSAFTRYHTSAASNQGGTGLVGSCSPHDNSSEAVKTDSTYNMKSNSDAAAIKQGSNGSSNNNDMGSTTKDVVTKPSTNNERVMLPSAIKANGYTSTFHPVQQWMVPDNATAGKAKADEVANNAGRNSHPGDVQSNLTQQHRPTLHYVHFENSGSGALQCGSSNVFDPPLEGQATNNYGVKAGSNSGSNKGQNNGSTAGASTAAANAGRTDTEIRAIDKSGPGGGSGSGNDTYVRRLAASMTPRQEQLKKYREKKKDRNFGKKVRYQSRKRLADQRPRVRGQFVKQAVQNQEGDGER

SEQ ID NO: 71272 - protein, 208 aa, Zea Mays
MARPRAKKRTTPQAAATDSVEPDATVGASSKLEEAAAEPATRERGKRVKAPPKPKPETEYFDEKGNFEDLWLSAFPVGTEWENIDKIKEFNWSFENVEEALEEGGELHGKTLYMFGSTEPQLLYVNGESKIVLIPIVVAVDCPFPPSDKIGINSVQRENEEIVPMKAMKMAWVPYVPLEDRLSRIDIFKTKIFTLGCTQRRLYATATS

SEQ ID NO: 71273 - protein, 159 aa, Zea Mays
MASNGSDMVMMYGTRRCWSHPSSPSQRLSPSRYHNSWIPNLRRMLMLTITACTQSRAFYRDEIMSAIEKHITAWTFFLGARWISSACKYRYESMYMKFSVLALECHAYVPSVGSATLELQSVLIQTEIMFGCSEGYNAFLFPMQMEVMLLQNGSHVTTK

SEQ ID NO: 71274 - protein, 151 aa, Zea Mays
MGTYGYAAPEYVSTGHLYVKSDVYGFGVVLLEMISGLRALDPSREREKVNLVNWARPLLSDRRKLSQLMDGGLEGQYNPKAALLAAQLTLRCLNGDPKRRPSMKEVVEALEKIESSAKGRMAREPRNSSRRGLVQSPRGDSARNNSSSRGR

SEQ ID NO: 71275 - protein, 421 aa, Zea Mays
MTSLRTNVELEGEAGEPSYRRLVLRLVSHVIRLYSSSLVTESEVFLNMLVKVTRQDLPLWHQILVLEILRGFCVEACTLRLLFQTFDLNPVNTNVVENIVRALALVVASIQASDSSEETLAAVGGMFSSKAKGIEWSMDHDASNAAVLVASEAHTITLALEGLLGVVFTIATLTDEALDVGELESPKCESNSMECSGQLALLCMALVNSTWLTILDSLSFILTRSQGEAIILEILKGYQAFTQACGVLRAIEPLNSFLASLCKFTINNPNEGEKKSILQSPGSKRSETSMDQRDSIILTLKNVQALRTLFNVAHRLHNVLGPSWVLVLETLSALDRAIHSPHASTQEVSASVSKLSRDTSGQYSDFHILSSLNSQELNRYGIKLLLIILRMVTDASEKDLISLGFQHDMISLWEFSPGIAP

SEQ ID NO: 71276 - protein, 52 aa, Zea Mays
MRRCRSGFLCRRAVCGGRVHLHGINICIPGIVVVLAACCTLRSRQKTKGKRV

SEQ ID NO: 71277 - protein, 129 aa, Zea Mays
MPQTNNRILSRPSISEKSGPTQHLKPSWITRRSVHDLNDAVTCTLRRTGGDHQSAEHRPARASQPTHPRCPVSPGHVVRSWSEIAGGQAQSIKQSSAASTRQPAAACRAQREADERILSLFSLRHHQKN

SEQ ID NO: 71278 - protein, 82 aa, Zea Mays
MRPMFSPRAHTSEERRRRGPTGQLLAITPARVAPLTSGPLPSDLPLATNSPSLAVARECRKSCCDALAQSMPIYMATIPVPS

SEQ ID NO: 71279 - protein, 179 aa, Zea Mays
MGIWDSILPGGGRRFIKRKDSDAGEAGRALEELRGSLYNDFHTSEGARRQQQKLCGPIVALTFNFVVAVGIIMANKMVMGAVGFNFPVALSLIHYLFAFALMSVLKALYLLPIASPSKSTPFSSLFALGAVMSFSTGLANISLKHNSVGFYQMAKIAVTPTIVVAEFILFKKKVSLRKH

SEQ ID NO: 71280 - protein, 567 aa, Zea Mays
MEEFLKLGVRSIILTSGTLSPLDSLAMELNLEFPVRLENPHVISSDQVWVGVVPVGPSGHALNSSYRTRNTIQYKQELGTAIVNFARIVPDGLLVFFPSYSMMDMCVDFWKNRNHSNSASENTIWQRICKHKQPVIEPRQSSNFQSAIEDYRAKLHDSSSGAIFFAVCRGKVSEGLDFADRAGRAVIVTGMPFATPTDAKVRLKREYLDKQGTPSNKNTKMLTGEEWYVQQAARAVNQAVGRVIRHRHDYGAIIYCDERFVWPNYQSQMSYWLRPHIKCYSKYGEVVQGLTRFFRDKASSDPLTLEPTDCNNCIAPPANKHMLKEKLSDLAASAQDECPQITLSGNSTMRRSNFMKLAQITPANRSTLTTKHNFVSTSTKHNLPEDQLSQDTNVDITVDLAIQGHLKEHTFKSLGLKKAKTMDRSKDAVVLDDVSSKLPQNIGSRALARYQCGGPTPESKKSTIATACGKNDGACEKTEGQESNSGPAFLKLVQEKLSPAEYTEFVEYMKALKLKTMHTKDSLEAITKLFSSPGRLPLLEGFRVFVAKNHLPLYEQLVRRHNNVSST

SEQ ID NO: 71281 - protein, 110 aa, Zea Mays
MHSICVPGSIFHIYVDVTSIIYKKQCNKGVKGSIVTLLHHPDIRVLNSILSKYNGNIKGNLRQEDDQRVARLSTHRHHRQSLPHQILIKKLARVRSLTVGAQQMGGIMQG

SEQ ID NO: 71282 - protein, 107 aa, Zea Mays
MHMRLRAQYPCYAAFHDEEWGVPVHDDKKLFELLVLSGALAELTWPAILNKRDIFREVFMDFDPVLVSKLSEKKIIAPGSPSCSLLSEQKLRGVIENARQILKVCLN

SEQ ID NO: 71283 - protein, 173 aa, Zea Mays
MASVPHSPPVIRKSGNLMVFVTPPAEPESPRSEFSTPPTSPRAEESPESPPAQMAPPPTPIYSVSVSTPPLVKTVSPPLHAEKLSRPSLVQVPPLQFAKVSAGSDGSLLAFFWDAVAHVQKAHSRLDKHISRWFGLDQSKYQWALNDYFERTGQEIDSSTLEHSCKNSESMTK

SEQ ID NO: 71284 - protein, 59 aa, Zea Mays
MASPSTHRLPRLMVRHCFPYLPKLATIALGGAQIQRRAREADAGADGIQTPDKWKQPPH

SEQ ID NO: 71285 - protein, 249 aa, Zea Mays
MFGQGTSQEKAILEVNLEAAKQIARELRLRDIGGIIIVDFIDMSDDSNKKLVYEEMKKAVEKDRSTVGVSELSKLGLMEITRKRLGHGHVYRNILCGGFGDQVRPSVTFMISEPCTCCHGTGRVEALDTSFSKIEREICRRLAASRRKSDPEKPKSWPRFLLRVDHEMCTYLTSGKKTKLGLLSSSLKVWILLKIARGFSRGAFELLPYSEKENYSMEKETSELPQKESRPKLSVFPIKKWMSRAKRAK

SEQ ID NO: 71286 - protein, 466 aa, Zea Mays
MGSAGEALPPPASETRPWDNYSQAKLSTVALAPKGRRAASDAPAGGEGGWSGQDEKPAADDDWLPINARRNAKWWGVGVTVLVLSWVITVYTLWQMVEMHECVPGKRFDRYHELGQHAFGEKLGLWIVVPQQLVVEVGLNIVYMITGGQSLQKFHDMVCHGRCRRIKLPYFIMVFASVHFVLSQLPDFHSISSVSLAAAVMSVGYSAIAWTASAAQGKAAEAEADYSLRATTTPGKVFGFLGALGDVAFTYAGHNVVLEIQATIPSTPGKPSKKPMWKGVIVAYVVIVACYLPVVLVGYWAFGNGVDENILITLNRPRWLIAAANMMVVVHVVGSYQVYAMPVFDMIETVLVRKYWFTPGFRLRLIARTVYVALTMFVAITFPFFSELLSFFGGFAYAPTSYFLPCIMWLIIYKPRRFSLSWFTNWICIVIGVLLMVLSPIGGLRQMILKIKTYKFYQDYSGLSHN

SEQ ID NO: 71287 - protein, 82 aa, Zea Mays
MMIDMWCPMTHSFHLSYSEMTITLEDVAMNLRVSIRRNIVRDNMELVRWEGCVDHFLGHPFLDVEVAKKWYTSGGILRWLNE

SEQ ID NO: 71288 - protein, 61 aa, Zea Mays
MALHRTHLQIHLLQRQLVLLRRQIYPLMLPAQTASLLRKLEQFQWLRSHLPHVQPWQWNTL

SEQ ID NO: 71289 - protein, 220 aa, Zea Mays
MAAVGARPVLYHHHPHPAPAGGAPAPMSSSYFSRGGGSSSPASSLSAAHLDISEFLFDDASGGGAISAGGAGSAAAPERPRTDRIAFRTRSEVEVLDDGYKWRKYGKKSVKNSPNPRNYYRCSTEGCNVKKRVERDRDDPGYVVTTYEGTHNHASPSTVYYASQDAASGRFFVAGTQPPGPGLAGVAERSPGRRHQSQPLATPAVPPGPSHVCRLRMGRH

SEQ ID NO: 71290 - protein, 594 aa, Zea Mays
MAASLAAAASRLAATGGELSWSARPCPGSLVASFPSAGRLRRPASGVRCGGGVLPAAAGTGAEAEEGGRFVGWFREAWPYIRGHRGSTFVVVISGEVIAGPHLDGILQDISLLHGLGIKFVLVPGTHVQIDKLLAERGKKAKYAGRYRITDSDSLDAAMEAAGRIRLTIEAKLSPGPPMLNLRRHGVNGRWHEISDNVASGNFLGAKRRGVVGGIDYGFTGEVKKIDVSRIRERLDRDSIVVVSNMGYSSAGEVLNCNTYEVATACALSIEADKLICIVDGQIFDEHGRVNRFMSIEEADMLIRTRAKQSEIAANYVKVVDEEDINHVRCLPMKHGTEHGMNGRDHINGYTASFRNGVGFNDGNGLSGEQGFAIGGEERLSRSNGYLSELAAAAYGGVQRVHIIDGTVGGALLLELFTRDGVGTMIARDMYEGTRMAREEDLSGIRKIIRPLEESGVLVRRTDQELLEALTSFIVVERDGSIIACAALFPFLEDKSGEVAAIAVSEECRGQGQGDKLLDYVEKKALSLGLEKLFLLTTRTADWFVRRGFKECSFDSLPLVRRKRIDLSRGSKYYMKWLQAAEVGHMAADGFAMR

SEQ ID NO: 71291 - protein, 895 aa, Zea Mays
MDDSVPFNDLGPSKPPSASFYDDMFESYFNRAAEAPEPAPKASSSPSTPPPVFDKPVFDDDPYTADPFDAIPLFGGGGGGEEEDLHGGVRSAAKPERTELEVVGFDEDLFPGLAGSTNFPMEKPAREVERDRQPVGFDDELIPGFDGSMKPAPQMEPETVAFDDDVIPDCSGGTSYPSSAREEPITRQESESISSSKISMSMPEDPFVTLGGTHKSGYSSLGLFSNLLNNIGMPRKEADTTPDNTSGIFQGSDIFTEFPKAMPPFSFTSENQSDRTERRYTENIISTSHSDRLPQEKTVQQASTEAPANTLTEMNFPEASVVHEVPVTTSFQTLNPFVEEDDLLEVNQSSQTTNDVWLTVLDIALVTLPTSAPPPSRPPPPLAAKKPPTESVTSEAYAHHCNQRYHHSICSSNTSKTSQIDELEDFFLTKPANSAIGHPQVLKHEGNGHYPSAATASFMDWTEMGHCKRGNQGAFDSMFTSSQYRQPEIDEKAEVCAHETESTDEEKRLENEQIQREHKEEQIRAEREMEEELERERENVRQREQEEQRRREKERVARQAVDKAIREARERSAAEARMQAEKEARQRAERAAVWKAATEARERAAVEAKERAAKAAAEAKEREAAEARERAATESRERDAKVAADARERAARAAAEAREKETAEFQEKATAEARAKAERAAVEKAAAEARWRAERAAFERVATEVKQRAFNDARERAAAAAAAEALARENQQRRATTEPDLESFFGMPSRSSSLPRSYNNTTTNPFDVQPGNAGSGGVRRTPSGSGFPFTQPSSSNLMDGLSSIFGAPLPSAVFQEVDGESEERRKARLERHQRTMERAAKALAEKNERDLQAQQEQEERHRIGESLDFEIKRWAAGKEGNLRALLTTLQYSLHA

SEQ ID NO: 71292 - protein, 88 aa, Zea Mays
MGAGDPSYSEENSSSEYSESPKSSDGGVGSRLRLLFLPMVEAKGREEKQATENNKRYEKAGETTALFIEGGGNRSPPTAVTEQSQSIQ

SEQ ID NO: 71293 - protein, 76 aa, Zea Mays
MRRTMREQGGSSSRGVWPVAVAWGRGFTRLNGVLGMYSSKGTRLRRRQGRSRSSSHSERRDGANTHANKQAVKRSV

SEQ ID NO: 71294 - protein, 1494 aa, Zea Mays
MVFLQRSRPVNPRKRPAPPPELEPEPEPPRPGPDASSAVDAAAALLADAGCTLLVPPHQPPSLPSPHSFAARLSRKLSAGGDASSPSAPARRLLEGLAAFAASSPARLRQLLLPTAPHEPSLARALLSVPALQPGLLALLLEKLPEHFGGDGALDGSPLQDDVGRLIVSQFRWLDFLADADAFVDKLVEVLSVAPHRLKKEIIGSLPEIVGDKSHAAVVAALEKLLQEDSEIVVAVLDVLSDLNLNEELQEQAVTVAISCIRTIAPDQTPHLLRFLLLSATPVNAGRIISQIREQLKFVGVVDPRAARSKKLKGKASANSTDGAILDTLRSGLRFKNMLCEAFLKELKSVDHPRDHKVIDVWLIMLIYANGGALEKAAKKILKSKILHECIRETLFDQCIHGNTELVKEHFMSYLSVSDYLLACKEEKAREFAAYLFTALFEEFTDTYSRQELVGSLVTHIGSGVSYEVSSALDIMISLTSNNSEELIPISSHITGKNILSFVFSAFHFLNRHINLFNTGILDYLESFGEDNLRKVYDIFCRLALAAGFNTGSGGSSVANEVLMVVRKQVSNPDMKYRRMGIIGVLRIVSTIASTDVNAAVNCSSSQQPNCEEALELLKMSVNSCKFVTLLLIFLYDELAALLDSKVIHSSIHDWVGEHVAELFETPFLADLENGELPEKYLCDGIEGELWMKLDGNISPILMSQFSLLTTIERLGNEGSLGGIDALLGCPLHLPSTKHLDGANWGNLSGLQKKTVCYSLYYAINWIRELLNAFGTQVESRVDNVSQKARNETAVKLLKRLRNLILLEGLLNAFLKDYPLSLPELRYLGDCSGSASTSKFNIPKNMGEESINGASSKRQKGCKGKVSEKVNPDDKLKQPTILDAFKRAGVTVSQATNKASSQPSSSGMMSKDIEQDATDPGELGLIDLMAAPVKLDMQRYKFRTIRATCLSLLNYSECQGSSSYLQTELPTYLYLLRDLHNKLDNLNPSIKPFLSTSKAKYTPTHCHKSTQDFLDKIQPLFLVLRKHLDGAVSMIKDESESCSDDWSSHSSSAGNPDIPYVVVSKSSIVTAVCKEILGCYRKLLGIPDLLNQPNMSILKQLLQTLQPTENFDDVLSEFQPSLAPCNVDYLYCGACKILEDIMDSVSSFSYLLSSNVLITIQSIVNSVVVLLDKSGEPNGKNIHMGCSKAIIPFLRKRLGYSAHKLLSADFPSEDAGKGWQSKGDLIQKILQIYLRNSDSTSDLLAEIGRELPKEPSLKTKDNQDVSYGFPTLCSSTITSWYRVLHEENTGSLNKTIKQALKARGSVDTILQEIQKSVDAFVSLIGMCKSHEKVSMHAMAVKHGGKFIDTFLKAFNFLERHFEQHNDTIVKMLKQLQKGTRIIQSICSDAKGNKRTMITSKVPPAKRSMERFLFQVKALLHSCSAEKEFQMGNLKHKDLQGHVVSSQAYGNVDEEDEEQTEVDSDLPADEHDNGNAMEEDAVEGSNETPMEEEEE

SEQ ID NO: 71295 - protein, 66 aa, Zea Mays
MIFVTLCHLFCNYLGECPFNCRFSPPHRSVGPECRPSSTTLVATMPKIRLRLTISDKDDLERTTTN

SEQ ID NO: 71296 - protein, 659 aa, Zea Mays
MTPAGGANHSPAPRSLVFAFYLTGHGFGHATRAIEVVRHLIADGHEVHVATAVPEFVFTAEVRSPRLRIRRVILDCGAVQADALTVDPLATLDKYREAAVLPREFILRAEAEWLSSIKADLVVSDVVPIVCKVASDLGVRSVCIGNFSWDFIYAEYIMEAGYHHRSIVWQIAEDYSHCDILLRLPGYGPMPAFRNVIDVPLVVRGLRKSRSEVRKELGIEENAKVLVFNFGGQPAGWKLKQECLPDGWICLVCGASDSQDVPPNFIKLAKDAYTPDVMAASDCMLGKIGYGTASEALACKLPLVFVRRDYFNEEPFLRNLLEHYQNSIEMVRSDFLAGHWKPYLLRALTLQPCYNGPINGGEVVSQILQDTAIGNKCISDKASGARRLQDAMVSGYVLQRVPGRDAGIPDWYSVSETKTGGGPTSQNVATKESAALCIEDIEILHGDLQGLTDTVDFLKSLSELNGNDLKSPKKQDLERTAASVLFDWETEIYVARAPGRLDVMGGIADYSGSLVLQMPLREACHVAVQRNHPSKQKLWKHTKARQLVNGGLVPVIQIVSFGSDLSNRAPTFDMDLSDFMDDGKPISYEKARELFCQDPSQKWAAYVAGTILVLMTELGAQFTDSISILVSSAVPEGKGVSSSASVEVATMSAIAAAYG

SEQ ID NO: 71297 - protein, 100 aa, Zea Mays
MEDVIVKAVDCSKQSESCVGRVAAMVAFSCGRELRSPPVLDAVARLLPPLPPPRTPRRHRHTTVRIHSSSSPRSRWLASVPSAPPPMPGSRTCQLLDGDE

SEQ ID NO: 71298 - protein, 518 aa, Zea Mays
MACHICPLFNLRLLLLLGAVLGNGGLGRGGGAEASDRADPDPYSILMWHDYSPPSPPLPPPDPPSPTATCEGDLHGKGDFHTRCEVSEEVELDGDVYITGNGSLVLLSGASLTCEKYGCVISANFSGEVRLSRGVRVTAGRVSLVATNITVADTVVVNTTALAGDPPDRTSGVPTGTHGDGGGHGGRGASCFVKEGQTQEDSWGGDAYAWSDLEHPWSYGSKGGSTSVEKDYGGDGGGIVWLFAEDLVMNGTVLANGGDSNEKGGGGSGGSIFIRAASMHGGGKISASGGDGLAGGGGGRVSINVFSRHDDTQIFVHGGRSSGCPDNAGAAGTLYEAVPKSLIVSNNNLSTQTDTLLLEFPNQPLWTNVFVRNRAKVAVPLLWSRVQVEGQLSLLSGAILTFGLTRYPYSEFELMAEELLMSDSTIKVFGALRMSVKMLLMWNSRMEIDGGGDSIVATSLLDASNLIVLKESSVIHSNANLGVRGQGLLNLSGDGDTIEAQHLILSLFYSIQGPKAEL

SEQ ID NO: 71299 - protein, 616 aa, Zea Mays
MGEPTAVPGRILSSSMPTAAKNMQMKEHPYLRTQLCWRKVTEEFSVPCKSVVTDSSSKSCSSTVVQDEDAAIAAVIDAAELKSEQLPSKKGQGSGRFTSGRNYGSLEGEAPPPGYVCRSCGVPGHFIQHCSQENKIPPPGYICYRCRIPGHFIHRCPSIGDPKCDNNKMLCSLVPVVTPVNGILDSLVPASPVSAVDDLPAELHCRLCKKVMRDAVLTSKCCFDSFCDRCIRDYIITESKCICGVKTLADDLIPNQTLRSTISNMLGTQTISGGSGTTRHRSSSGSNPDPKIQSHTASTREVKQSRDHQLPAASALDDVLQVATEGALVNQPREKLVPSAKILGKDGGNFAQVSAEKTVANAEALKVKDGTESTSKATTVSGAREHNVTRTDQPKKWKKAVLTKNFQPNNVGYGYNVPFDPAYCNPFINGYPWATEPYMYSSMGVPYPGYPMDPYCVNSFTCIPSQALAMQGYATSYQRPETEPMHRGGTAAAPSKRPERSDRPKDTRHQPQSREHERQLGSSHVSESRTRNRTRSSSEGRDRGHSDRASVDHHEDHSTRKRTRDSSPKYGDRQSDRRSSHGSRSMMTPEEDASDDECNFKRRWGRRSSGGVDTRH

SEQ ID NO: 71300 - protein, 865 aa, Zea Mays
MFMENAMDGRHLHTISSVEYLTARKAAVVLSNLKTGSENMYSSFKDSSSIKAVGNMLHLIVEACIARNLIDASAYFWPGYVVPLKESSPVQASPWSSLVEGSPLIELKDALMVTPASSVEELEKLYSFAVSGSPEEKLAASKILCGASLLRGWNIQEHVVQMVLKLLSTFLPLDSGSEGRYVQHMPMLHALVSGISSIDTVHILSLYGLVPEVASMLMPLCENFGSLPPSDHRSCKLEEASVYSVFSCAFLSLLRLWKFHRPPIESALSRRGVSVWSELRLDFLLLLRNSHSSLKNLSNVTQSSIFELDPPFQKPLYIDSFPKLRAWYFQNQACIASTLSSACSRTTVLHVANMILKIICHNKVPKGGVLSVNPQSTANSTTSSSPAGVQEDMCQWPTLPAWEILEAVPFVLEAMLTSCAHGRLSSRDLVTGLRDLADFLPASLAAIVSYFSAEVTSGIWKPVMLNGMDWPSPAATLPVVESEIKEALAFAGVHINICPRPRSAMPMLPLPIAALMSLSITVKMEEFSHLHGIISQGIEICATSSSWPTMQIIGALWSQKARRWHDFIILTCSQSPFTRDNTAVAQLIRSCFSSFLGPLVDGRSCSVANRGVANLLGQSSDEKAHRLAVAPGFLYMRSCRLFPNNTFVCEEILEVVIERAHALANDRSSDRPARLRSECLPLSAASSLVEQIASLAATMLCHAGGVNLIRLLYEQIMPTLLLSGGEAKLGSGGMVCSIIEGYTLAYVLLFSGATVWGVGETSPAYTLIYTSKRQRVLDRHLEFMARVMEGNIVLGCGDATWRSYVLCFVNLLVSFVPAWVPEVKLNTLQKLASGLRRWHEGDLALSLLELGGAKTVTSVVESLLR

SEQ ID NO: 71301 - protein, 1031 aa, Zea Mays
MDGEQAARWAAAQEGVPVGADLVAAALRQLRFLAAVDRRRWLYDEGPLLDRAIRRYKACWLPLLDKHTKGVVVDGPLVVPLDCEWIWHCHRLNPVQYIRDCKKVYGRILNNNNVESSTQTKSTLESEKVWKELYPEEPFELLFTRTFDTAVDVNPAGAEEDITYDLVSAVKRQSSFYYQVGTPTMHDPRFLQEALARYKAFLYLIKMNQEKGLQRFRVPTYDVDLLWHTHQLHPITYRNDMVKLLGKVLEHDDTDADRSEGKKLDVGFTETTEQFESTFGVRYWKAGCMYRGNVPSPVTSTPQTFSAEVGTGSYICKAQKDLNALDVTVVELYLQIVDIKNLPSAVQKENVYVRFAKNQSDMFISDGGRLDISTVTGKNTGVCLQCEPTGELILAVMVDQLSKKPEPIGKVSFPLHDLTGPDSKLSFEKWFELKAHGGHAASPPVSLRVAASATVPSSAQKVFTMVRMEPFSLKSCLLPHSIKDQNTGSWTRFVNDCGTELIRLQIREHKAKNSMAVVRELVGVLKSTKKQIQLAEFKENKWTLKDSNLPISHGTDGSLLDLKGDNHLIKLYRGRKLEYERKCCSAHSEDVSAVTAVKFCAEHPYGKAVALLDTEAQLIMVNEDWLLLPWISISVLFMDGDGGTKLGGGAMVQKGTVFGSDTSMVLETQTVGAGSVASNLAQCGTCSAVFGGDDKEMANCKVEHASSGASRTVVASGENGHTETAGCGGGCGSNCGPMMAEDPKAGNAKSGGCGSGCGGGCGGAGGCGTMANEGQSRSGGVGTLLSSNAMGGEGQQAHSAGCGSGCGGGCGSGMVIEGSKVNNVNAMSGGCGSGCGGGCGSGMVIEGSKANNAMSGGCGSGCGGGCGSGMVNEGSKAANTMSGGCGSGCGGGCGALFNASTAAGEGLHNKSAGCGGGGCGSGCGGGGGCGSGMAIEGFKANHAKSGGCGSGCGGGGCGTLFSSSAAASQGQSRSGGCGSGCGGGGCGTGSMVAEGSNGGNAKSGGCGGGCGGGGGCGGGGCGGGCGAVFNA

SEQ ID NO: 71302 - protein, 169 aa, Zea Mays
MHARPNFCSLGLKLRRLAELSGRRRASGSCLSPSCARPSSFHAQAKLPARRCSSLSAHRARCSLTLLPAAPTVGPCAPALLLRCHGFQRSASCSLFPTRQPLLSCPRQHVSMVAFAKFANVLLPVRLLSLLRASMHARRVPFVVPLHPLLSLVTTPDVLRPASFPSLLV

SEQ ID NO: 71303 - protein, 199 aa, Zea Mays
MPFVTEELWQAFPYRKQALMVTPWPTTDLPKDLRSIKRFQNLQSLIRGIRNVRAEYSVEPAKRISASVVATADVLEYVSREKQVLALLSKLDVQNVHFTESAPGDANQSVHIVADEGLEAYLPLADMVDVSEEVKRLSKRLSKMQSEYDALVARLNSPSFVEKAPEDIVRGVREKASEADEKISLTKNRLTFLQSTITT

SEQ ID NO: 71304 - protein, 201 aa, Zea Mays
MGGFVKTHKTNAYFKRFQVKFKRRRAGKTDYRARIRLINQDKNKYNTPKYRFVVRFTNKDITAQIISASIAGDMVLASAYSHELPRYGLEVGLTNYAPTALAFCWLAVCSRSVVWIRSTRAMLRPLVRTSLLSQLMRGGLSVLSWMLALSGLQQGTVSLVPSREHWMEAWIFLTARRGLLDSRRTTSSWMLIPTAGTTPRS

SEQ ID NO: 71305 - protein, 118 aa, Zea Mays
MVGDPWDDEFKLMNLIALLSYTVHVHSHLRPLMARIGACGPGNLGGLSHYPSIRFRLRFCVALVSLKVSAPEWVMAFLRRCRRRDLVGGAAGGGRVRPACAGSSIAQSAVQIRRHPLV

SEQ ID NO: 71306 - protein, 142 aa, Zea Mays
MDEERAGEVGLSRLARAQAMTKSRAREDGFNSSTANTSTREARWTKSERTDGLGLGQEDDKRAELQNHAREIERRVTRDLSIHAGNLDESELVATTPDQATMHRHECRGIAAPQQQASCEAKLTAGQSDQSARSNRRDPNTT

SEQ ID NO: 71307 - protein, 156 aa, Zea Mays
MERGEPTSPYPEPHEPERCNIHSFCKTLTTSDTSTHGGFSVLRRLVEEGLPQLDMTHNPPWQELVAKDLHGNEWYFCHIFRGQPRRHLLMTDWSVFVSSKRLVSGDTFIFLSVTALHVKVVLYIYICFLALLNFWINLLTVLHLIEVRTKSCGSGS

SEQ ID NO: 71308 - protein, 176 aa, Zea Mays
MPNPPTGIMLATKDVSATTTKDFMLEKLRDCCAPEIVQMVQDSDPESLNVVNSIRYRSPWQVALAAFHRGAVTVAGDAMHAMGPFIGQGGSAALEDAVVLARSMSRANAAGGGHGAAVREYVRERRPRVALLSLESFVAGTLLRARSLVGKLACVAVLALLGTRSLRHADFDCGRL

SEQ ID NO: 71309 - protein, 138 aa, Zea Mays
MPPPSASASRLATHWIADALADDESLDFSVLKALLGDSSKSLAGAPEATRERVALRCIQEVSSVIASGGDAAAPAGVPRVDGAWSCEDVLFRLIRDVGSSGELEKDLLPPLSQDIQEYICTKKFTLPETSFQLSSSAA

SEQ ID NO: 71310 - protein, 1859 aa, Zea Mays
MGDGGVACAVRAVEGFHAGALVRRGGAGEAMPDKGEKAHGHHHQQQHWKNQQSASATDLEEGELLSGEAETNGLPERSMPPKKWRKVLAASAAAVEVEPGEIVSTKQAVPLKKARRNGEVDKVELLPERQRKVKSSGKSTRKSIKDDMEPGEIAPPEKRRDAKSQRADDNSRRPSSSAQKSSLRDSDEEPGEIKPESSTSGSLRKNQPTEPHSINHKHHTDTSDQSGSKSHRKGPKGEGKRSAARHLSGRNREISSPTRDRRDRHERSPGILGRFPHERSRHDRYDRSPSRLERSPHRERARHYESRDHSPYVSPRHRARQPHFRDNTPSRVDNFPRGRVQREDVRDRSPFLHDRSPSERFRPTDTHEASKKSRSGNNSEKSQHKSKSAKQSSKTKSGSNEKNEKISNEKPTESSKYTELPPPPPLPLPPPPPPPPPPPPLPPAVPPPLPPPPEPEPTGVLAEDMIEDMDICDTPPHTSAAPEPTDPIYDIGRWFYLDHFGIEQGPSKLAVLKKLVEDGYLLSDHLIKHADSNRWVTVENAASPLVPSDFPSFYSDTSTQMVNPPEAPGNLLDEALEEASNLASGSEDKQMVEASAEDSEEFYINDRVEALMDGSILVHGQELEIIGELLGADFQPADWQRLSHPEDFTRFHVHIEGDDEIIGGTEFLENRTTDAYGLVSVDNFHHYVESSEWFSGRWSCKGGDWRRNDELGQDTPFRKKLVLNEGYPLCQIPKGSYEDPRRPCKDELYYPVRGKKHDLPLWAFSSTEEDIDGVNDTTKNTVVPGRPGQTRQPPSEVKVMLQVVSINYHVIKDQSSVEPRTKPRGTDRPPSRSSRSHSIGAERSSIHDGSSHFRKHHDHDSQSFHKSKSVPNIPKDHVCTVDELSVNRGDWYYLDGTGHDQGPFSYSELQELVKKDTIIEQSSVFRKIDNTWFPVLKDLKPGSSVPSAAPSSNLIAAFTHPDQYNFGVNQGSSSFHELHPQFAGYTRGKLHELVMKYFKSRELTLAINEVLDPWISAKQPKKEFEAYFSHNSASRNFLPEDGGSAKRARLLPDQSDENIHLSEDIIASRKEDICFEELCDGASSVDNDSVNPRAGNASWGLLNDHLLARIFHFMRADLKSLISSAATCKSWNAAAKYYRNMCRFIDLSSVGPLCTDSVFCDIMAGFEKQNIRTLILAGCSNLSSHALGRVLEHLPQISYVHIQGCSHLGDLKNKFQHVKWIRSSLNPEGSYRKMKTLKQIGDGNNYASKVARNFDQLDDSDELDGYFADISKIEGASLFSFGQGFYKRSKLLDARKSSAVLSRDAEMRRLMQRQAENSYRKMEEFVINRLREIMRCNRFDFFIPKVSKIEGRLKNGYYARHGFRTIKHDIRTMCQDALRYKDGNDLDDVKQIVVSFIQLAKRLGNPRYISERNGAAAQDSLDISQYSFDTKLKKKQNKTRANLVAAGADNSSRAFDLEIKRSLSKLKKKDVCSGSETSDDDGYSEGDETESETTVSDTESDFDVNSGAWDLKGNCLKLTEHGESVIDDRILGARMTKASLVPPVTRKYEVIEEYLIVADVEEVQRKMRVSLPDDYSEKLLSQKNGTENLELPEVKDYQPRKVAGDEILEQEVYGIDPYTHNLLSDIMPSDLELSPTDKHIFIEELLLNALNKQVRHFTGLGNTPMTYNIRPVIEEIQRSAEDSGDRRTLKMCLGMLKSMRNRSDQNFVAYRKGLGVVCNKKGGFGVDDFVVEFFGEVYPSWRWYEKQDGIKHIQNNSEDQAPEFYNIMLERPKGDRHGYDLVFVDAMHKANYASRICHSCNPNCEAKVTAVDGKYQIGVYTLRPIAEGEEITFDYNSVTEKNMKHQSASVEVKYAAAAI

SEQ ID NO: 71311 - protein, 154 aa, Zea Mays
MLQVLVSIQGLVLNDRPYFNEPGYKNSAETTGGERCSLAYNQTTFVRSCKTTLYSLRKPPMHFETLVLWHFHEHERAILDACRAYMSGTVVGSSAGTGSNRRYVHDKCFAEFHKSLTLYTEHLRAEFATNRRRVMELETEDEIVPSIAASMKSC

SEQ ID NO: 71312 - protein, 428 aa, Zea Mays
MGVMPFGPGNGVKDDHPAAVTSLVSGASGDGLSVDEASFVATTSSVTSMVAAKEETRQAVADDLNSSRSCPCEWFVCEDDQNSTIYFVVQGSESIASWQANLLFEPVKFEEVDVLVHRGIYEAAKGMYHQMLPYVKAHLKSWGKSARLRFTGHSLGGSLALLVNLMLLVRGEAPASSLLPVITFGAPCIMCGGDHLLRRLGLPRSHVQSVTMHRDIVPRVFSCHYPDHVANILKLANGNFRSHPCLANQKLLYAPMGEVLILQPDERLSPHHHLLPPDSGIYHLGGGGGGGGAGTAANAGEGSLPQLRSALSAFFNSPHPLEILKDGAAYGPRGSVYRDHDVNSYLRSVRAVVRKEARRAREAERERWRLLLWWPFGVHGVSSASAGRRGGLVDAVSEAARRAHLLLVVLLPAELLALGALLAVIRFR

SEQ ID NO: 71313 - protein, 1053 aa, Zea Mays
MGKVNFVEIRSFWHIFRSFDRMWIFLILSLQAMIIIAWNGGTPSDIFDAGVFKKVLSIFITAAILKLGQAILDLIFGWKARRNMSFAVKLRYILKLICAAAWVVILPVTYAYTWENPTGLARTIKSWLGDGQNQPSLYILAIVIYMAPNIVASMLFLFPFMRRFLESSNVKVITIIMWWSQPRLFVGRGMHEGAFSLFKYTMFWVLLLATKLTVSFYIEIKPLVQPTIDIMREPIRTFQWHEFFPHGTNNIGVVISLWAPIILVYFMDTQIWYALFSTLIGGIYGAYRRLGEIRTLGMLRSRFESLPEAFNERLIPSDANKSKGLRAAFSSRPKASGDERQKEKRAARFAQMWNVIITSFREEDLIDNREMDLLLVPYCKDRELDIFQWPPFLLASKIPIALDMAADSGGKDRDLTKRIKSDPYFSFAIRECYASFKNIINTLVFGQREKDVLAQIFAVVDQHIEDETLIKDLNMRNLPALSKKFVELLELLQKNKEEDLGQVVILFQDMLEVVTRDIMEEQDQLGTLLESAHGANSRKHEGITPLDQQDQLFAKAIKFPVDESIAWTEKIKRLHLLLTVKESAMDVPTNLDARRRISFFANSLFMDMPNAPKVRNMLAFSILTPYYKEDVLFSLQNLEEPNEDGVSILFYLQKIYPDEWKNFLERVGCKNEEGLREDEELEEKLRLWASYRGQTLTRTVRGMMYYRKALELQAFLDMAEDDDLMEGYRATEVMPEDSQLMTQCKAIADMKFTYVVSCQQYGIQKRSNEPCAHDILRLMTEYPSLRVAYIDEVEAPSQDRNKKIEKVYYSVLVKASVTKPDEPGQSLDQVIYKIKLPGNAILGEGKPENQNHAIIFTRGECLQTIDMNQEHYMEEALKMRNLLQEFEKKHGVRYPSILGVREHIFTGSVSSLAWFMSNQETSFVTIGQRVLANPLRVRFHYGHPDIFDRLFHITRGGVSKASKIINLSEDIFAGFNSTLREGNVTHHEYMQVGKGRDVGLNQISLFEAKIANGNGEQTLSRDIYRLGHRFDFFRMLSCYYTTIGFYFSTMVFW

SEQ ID NO: 71314 - protein, 308 aa, Zea Mays
MSNSGRWRRRTRSVAPSPATSSPSSPGLREAQPFRLPQWKFSQVLGELPPAAEARRDGAPRPQDDDDADEISAIEFDGRGEYLAGGDNAGRVILFRRTDGDGDDARPRAELERTDRAGAPPPRYSYATEFQSHEREFDVLDSLDISERIKKVRWCARPNSSLLMLAANDRTVKLWKVSEHKAEAPKKGNGRPSWGTAALSAATKLPRGCSSAEPDERPEKAAGDVGDGYSAKCRRVFGRAHEFNIHSVSTNCDGETLVSADDVRINLWHAEVTRQCFNIVDMKPADMEDLVGSRTARTALSPAHFSVR

SEQ ID NO: 71315 - protein, 58 aa, Zea Mays
MCLALRLLVVLLFPLSTLLFLVTIIIGTICDKMTNLTTFEVGALPLRLVLVGVLLATL

SEQ ID NO: 71316 - protein, 50 aa, Zea Mays
MEGGGLKRSNSPSGPSSTVPDGLAPITTTSAGTSGCSRAYITCTSSCKVL

SEQ ID NO: 71317 - protein, 300 aa, Zea Mays
MVKKANGKWRMCIDFTDLNKACPKDEFPLPRIDSLIDAAGLSELMSLLDCYLGYHKIWMKKEDEPKTSFITPSGTYCYLRMPEGLKNARGSFSRMTAKVLHSQIGRNVLTYVDDIIVKSTKQENHIADLQETFANFRQASLKLNPEKCVFGVKKGKFLGCLVSTKGIEANPNKIEAILRMEPPSTKKGAQRLTGRLASLNRFISRSTERNLPFFEVLKSAEVFQWGSAQQKAFEELKQYLIDLTTLTPLAPGAPLLMYVAALHSSVSAALVQEKLEGQLKKQAPVYFVSEVLSLSKKNYT

SEQ ID NO: 71318 - protein, 241 aa, Zea Mays
MANDEAGVEDAFTQEINHSYVPRYHVLSWMETVEGMVAGVASLPPVYLILNREIYDTCSCLLMMPVWCQSYLLETGWGWKRLVPYRPGYVELHVFKKYLGDYFDHNREAFLCAEQKPDPFGWIVAEKSALIAAAKSCLKMEKALLRYCASFLTPDDKRLILRIKDQAKQMIQSEGDQSLIVTICLECIAKEAELMYNYLPCDFDTTEEVAVCNKVRRSALNLMLYKGSESAVAAGAMMVCS

SEQ ID NO: 71319 - protein, 156 aa, Zea Mays
MEIKGTMVSSLCSECDKLYPGPQHLCSIDIESTAVPRWMSSLRFLSSINIELLALGAQDFHVLGSIPSLRCLSIHVKETRDERLVIGKCYPFRCLTEMQIDYESMAVVFAPGSMQNLKELHLVFGVKERKIRSHAQAIRAAILFANAGRIPATEGL

SEQ ID NO: 71320 - protein, 234 aa, Zea Mays
MTSAVLAGRDEVHHGHPHHRHWGGARAPLMPKPSSNPNPRRYRPGPNPIVSGSPPAPRAGSAVAAEPLPSPLRHVKFRPSELTPAEARHLRERLTGELGRVRAFVSRIDSWQDGRRRGPEPEPEPPARRSSPPPALVEAMRRRCADILTRLRRSKKSVWFNSPVDVEGLKLHDYRAIIRSPMDLGTVKQNLTAGRYPSHEAFAGDVRLTFNNALRYNPPDHHVHRCHRCDNCSG

SEQ ID NO: 71321 - protein, 356 aa, Zea Mays
MDANQVRQDKNGCTPLHWAAIRGNLEVCTVLVHTGTKEELTLKDSGGLTPVQLAAEKGHRHLSNVLSNATKVSFEDKFFPGKSRKIGYAPFLFAYLVICLILFLNSIVFAPNFSRITATAGLWSWAAVSLFFASQVMFYRVSRKNPGYIKANSKRIDPKEPLMEIDLTNSSTWTGNWSQLCPTCKIIRPMRSKHCPTCKHCVEQFDHHCPWISNCVGKRNKWDFFVFLWMGIATSFLGAAVGFHRLQTEPVILSSSESWIHFMVTKHPGAVLFMFLDVFLLTGALILTGAQAVQIARNITTNEAANRSRYTYLRGPDGRFRNPYSRGCQRNCTDFLISGYSNDEEVAWPTLQQTVQ

SEQ ID NO: 71322 - protein, 125 aa, Zea Mays
MKAARGRRWESRTSAPPSIPPTTKLAAYQTRQLRARSATVMPREGDGGIAARQIRLLARERKEGRSGLSRCKCLSRTTGHARGCQGSPSTVSHHSPPRIRGLQARTPSAHSVSDLETAQIQTINA

SEQ ID NO: 71323 - protein, 297 aa, Zea Mays
MSSYPVLNNRPIDQWRVTDLKDELRKRKLPVKGLKEELVKRLSDSIQSEREADEADEDVGVNVDDQLPDANAIEENTVTVTEVHQETVVDVTHQVEVPTTEVGQESIISPTRGPPSVDVEEASTTKGKVPESVARGNLTFEEVQVHTKSTNEPLHEKTTDVDTNDAVDVNSDLIPAEVKFGATEASKIEEQDFPPAPVDDLTSDSTGPLGTDVVTAATSGAGPMDTDVFIATTSDAGPMDTDVVTAAPVSDEGEKLAPKDASGNKVSMHDEEQNNSDTMNEDCKPIISQSNNQVPEN

SEQ ID NO: 71324 - protein, 403 aa, Zea Mays
MYVKSAFLNGFINELVYVEQPLGFEDPRYPNHAYRLSKALYGLKQSPRAWYERLRDFLIKKGFKIGTVDTTLFTKKHNSDIFICQVYVDDIIFGSTNDYHCKEFGELMSKKFEMSMIGELTYFLDFQVKQMKDGNFLSQEKYTKDLLKRFNMEKCKPIKTPMPTNGHIDLDEEGNPFDQTIYRSMIGSLLYLTASRPDIMFSVCMCARFQVNHKKAHLRVVKRILMYLKHTPSVGLWYPKGATFDLIGYSDSDYAGCKIDRKNTSRGCHLLRRSLVSWTSKKQNSVALSTTEAEYIAAGACCTQILYMKQTLLDYGVVLEKVPLLCDDESAVKIANNQVQHSRTKHIDIRHHFLREHVAKGDIILEGVRSEDQLADIFTKPLDKTRFCMLRNELNILDLINFT

SEQ ID NO: 71325 - protein, 79 aa, Zea Mays
MLKIRTHFSKLFLQKYLSLKYMLAQVTILNKKIKTGYTYIRRPSPPALNTITAAQKLYPEKTTGNKTLSMEITQQDLPD

SEQ ID NO: 71326 - protein, 483 aa, Zea Mays
MAGEKAPRAFPIEELPGHLIGEVLTSGGLAAADLARLEATCRALRPLAEYAASKLCAARAAFAAMGPAARGGLLERCGGSWKKVLRFLQSVEQSSGTVETTSGSMQVATGRYHTLLVHDSSVYSCGSSLCGVLGHGPDTTQCAAFSRVSFPSLSCVINISASHNHAAFVLESGEVFTCGDNSSLCCGHGEVGRTIFRPMQVEALKGIPCKQVATGLSFTVILTRDGQVYTCGSNTHGQLGHGDTIDRATPKLIELFEGSTPVVQIAAGASYTFAVTDDGTVHSFGSCTNFCLGHGDQHDELLPRAIQSFKWRNIHVVRVSAGDEHAVALDALGYVYTWGKGYCGALGHGDENDKTSPELISSLKGQVAVQVCARKRKTFVLTDKGSVVAFGWMGFGSLGFPDRGPLDKVMRPRALESLQDHYVSQISTGLYHTVAVTSKGIVFGFGDNERAQLGQEYIRGCLKPTEIMFQKSMEDIPIAAPSG

SEQ ID NO: 71327 - protein, 390 aa, Zea Mays
MGGGDDRRAAALQRSSSPWSVGERWRAHAGMVLVMLAYSGYHVLAKSVLNVGMNQVVFCVYRDLLALLVVAPVAFLRERRVRPPVTPQLLASFALLGFTGLYGNPLLCLVGLRYTNASYAAAFQPSIPVLTFLLAAIVGYSVEAISVFTKDGILKVTGTAVCVSGAILMALYRGPSLIALLRSMPTAWTSAPYHPATPDWFTPAVPVLEQGVEAWQLGVLCLIGNCLLVAVYLVVQAPVMIKYPASLSVTAYSYFFATTFMVLTGVCATSGLHEWALTKAEVIAVLYAGIVASCLSYSIMTWANKVLGPSLVALYNPLQPAFSTALSTVFLGDPVYLGSVIGGVSIIAGLYLVIWARYNQGQRAPTDGCLDPLIIVDNPRIHKTQESPFV

SEQ ID NO: 71328 - protein, 456 aa, Zea Mays
MAKKGAKRKQQPPPAAPTAKKGSKAVPPPKAAKRAPKKQELLESSDDSDTEQQLLEEASHLDVPSDSDAEELSGSDAEADELSGSDADSDGSSSSGDDVEDEEEEEEGDGSDDDPLADDFLAGSDEGSEGGDSGLESDESDDLEAKSRAIDEQKIKAEEDAEEELQTNIRSESDEFRLPTAEELEEEAHRPPNLPNLKRRISEIVRVLSNFSKLRQKDVPRKDYIEQLKTDIISYYGYNDFLVEALIEMFPAVELVELLEAFEKRPPECLRTNTLKTRRRDLAAALIPRGFNLDPIGKWSKVGLVVYDSTISAGATTEYMAGHYMKQGASSFLPVMALAPQEKERIVDMAAAPGGKTTYIGALMKNTGIIYANEFNEKRLHGLLGNIHRMGVTNTIVCNYDGKELPKVLGMNSVDRVLLDAPCTGTGTIWKDLQIKTSKDIEDIRSCAFVQKRSVA

SEQ ID NO: 71329 - protein, 78 aa, Zea Mays
MDYVSPSSRPHRHIPDILFGYRWYALYCTFDSGLHKVYDVYGLSDLHSLDHHHLILLHMNQCRSCPPIISTRCCSTLF

SEQ ID NO: 71330 - protein, 84 aa, Zea Mays
MHLADTVDGFSLMTYDFSGPQDPGPSAPLKWIHHSLAAVLSAKDSSHSNSHSRMIFLGINFYGYDFLLSGGATPKLCVPSPGKP

SEQ ID NO: 71331 - protein, 319 aa, Zea Mays
MLVPVLRNPDSLHLAVQSSVSTRTHSYHTDSSKCQLLLVDDSNTVIEKSNDAIRIPQSSLATVFFINWPKADLKKIDTHHLEYLPEVFMYAPPAKRTRGEALSLYACLDAFLREEPLVPEDMWYCPRCKEQRQASKKLDLWRLPEVLVIHLKRFSFSRSTKQKLETFVNFPIHDLDLTNYIANKKTSERQIYELYAVSNHYGNMASGHYTAHIKLVDENRWYNFDDSHVASIDEDEVKTAAAYVLFYRRVREQDIARGTSNGSQLYAKRSHGYSHSHCQEYMACWKKCSSRAVNAPLSSCHRRYFVQCWYKMGILYEVS

SEQ ID NO: 71332 - protein, 666 aa, Zea Mays
MPSDKAKAPKKKGEEDPGIPPAPCEGEISHEPHRQRSLNGWQKVLNPELVKGPWSKEEDEIIVQMVNKYGPKKWSAIAQALPGRIGKQCRERWHNHLNPAINKEAWTQEEEITLIHAHRMYGNKWAELTKFLPGRTDNAIKNHWNSSVKKKVDSYISSGLLSQVPCLSLIECPAQCDSLSAMDQQNNGGTDCNDQNTSVVLSSDLQVNVDANKKEAHDSHSSLCQGVCYPSTETVGSVLPDDLEMDMDEGSGNSIFADDQTLCSTSNQEQSMVPFVVAQEMPVSVLSSVSSAEQKRHLISDAKSLKSELWKDVCLQTLITGDTDDPDASSRLNNPDSSKMDTNFLKEAYPLHTPNPSSVIETVYEPMALVTISPPFICSDGLSFAPENRSKPGEMSDCEAEMVTCSNNFFGNAEQSAKLASSDDRPEAFTMTESTTNCGGEQLTDAKEPVASTAKERLSKDIETMPDKKKGEGALFYEPPRFPGLDVPFISCDLVTSADLQEFSPLGIRQWMRSTMNVPTPLRLWGSPTHDESPDALKTAAESFPCTSSIMKKRQRSLLSPTPDERIEKKSGIAKGVTDISYMITATCSMNATNDEDIVTESAVCAKQPSLKHLDKKLEFSDINKENSDGASEQAKDAQNTQLVDEQHSSPNVVNPNTDLQDNIIG

SEQ ID NO: 71333 - protein, 65 aa, Zea Mays
MTRVVVFNPNSSYDMRLVMLCLLVISPIWVMWAEDLNTCQMFDDKPKPGFINILTSIESRLMLVS

SEQ ID NO: 71334 - protein, 440 aa, Zea Mays
MAILLLLLFVLSSASADEYGEELLQRAWGERDWMVSVRRRIHAHPELAFREHRTAALVREELEHLGLPARAVAGTGVVADVGSGAPPFVALRADMDALPLQELVEWEHKSKVDGVMHACGHDVHTAMLLGAAKLLSQRKDQLKGTVRLLFQPAEESGAGASHMIREGVLDGVEAIFAMHVDYRIPTGVIAAHPGPTQAAVCFFEAKIEGKSGMAETPHLNVDPVVVTSLAILSLQQLISREDDPLHSQVVSVTYVKAGKALDATPNLVEFGGTLRSLTTEGLYCLQRRVKEVVEGQAVVHRRKGAVEINSNDYPIYSAVVNDEKLHHHVEDVGRRLLGLDMVKPVEKIMAREDFALYQQLIPGVGIEIKNKKADSVTQLTTLISSLMRMSFHSVLLCIMQLQNFISLRLPLCTKEGTCSRVDDLELKRWLKCGRRAGGCA

SEQ ID NO: 71335 - protein, 429 aa, Zea Mays
MEAGEIGGALVFILAAAAAVAAAVSVGAVDFSRPLTAGAPFDFQAAVSWLIGILDGTSSAAADVDGAWVAVRAGVIAPVLQVAVWACMVMSVMLVVEAVYNSVISLGVKAIGWRPEWRFKWKPLDSADEEKGTAHFPMVLVQIPMYNELEVYKLSIAAACELQWPKDRIVIQVLDDSTDPFIKNLVELECEHWVNKGVNIKYATRTSRKGFKAGALKKGMECDYAWQSEYIAIFDADFQPEPDFLLQTVPFLLHNPEVALVQARWSFVNDTTSLLTRVQKMFYDYHFKVEQEAGSATFAFFSFNGTAGVWRTGAIRDAGGWKDRTTVEDMDLAVRATLKGWKFVYVGDVRVKSELPSTYKAYCRQQFRWSSGGANLFRKMAKDVLFAKRRRLPVFSTMSSSPSQSQSRSFTYQCGVLPIFPWCLPWSQL

SEQ ID NO: 71336 - protein, 1103 aa, Zea Mays
MTVPTKDDSQSGTVADTVPLPTYRSLAAPVRKPVDKFALLPAFLKVRGLVKEHIDSFNYFVNKGIKKIVEANNRIEARNDPSIYLRYLGVHVGMPSVHVEYNIENITPHFCRLTDRTYSAPIKVHIEYTVGKQHEVRRKNNFIIGYMPIMLRSHACILYEKDEAELAKYGECPLDPGGYFVVKGTEKVILIQEQLAKNRIIVDTDSKGRVIASVTSSTHAIKSKTVIFMDKGKIYLQLNQFNKPIPIIVVMKAMGMESDQETVQMVGRDPRYGDLLFPSIQECASERIYTRQRALQYMDEKVTYPGATNQKEGRSYSILRDVFIAHVPVKNGNLRPKCIYTALMLRRMMDAIVNSDTFDDKLIMQDSITFGLERAISTGNWDIKRFRMHRKGVSQVLSRLSYMASLGYMTRITPQFEKTRKTSGPRALQPSQWGMLCPCDTPEGEACGLTKNLALLSHVTTDQEEGPLIYLCYSLGVEDLLSLSSEEIHTPGSFLVMFNGLILGKHKDPQRLVIDLRNLRRSNVIGEFVSIFINEKQHCVHIASDGGRVCRPLIIADMGISRIDETHMEKLRHGTCGFDDFLRDGLIEYLDVNEENNALIALYEHMDQDDVERSSITHIEIEPLSILGVVSGLIPYPHHNQSPRNTYQCAMGKQAMGNIAYNQLFRADSLLYLLVYAQRPLLTTKTIELVGYDKLGAGQNATVAVMGYSGYDIEDAIVMNKSSLDRGFGRCIALKKYTVLKDNYGDGVSDMIVEPQRDNGVLIKQNMRALDEDGIAGPGQIIRNHDIYVNKRTPKNTSKGIGRALRESDYKDSPALYKGVDGETTVVDRVMLCSDTNDKLSIKCIIRHTRRPEVGDKFSSRHGQKGVCGTIVQQEDFPFSERGICPDLIMNPHGFPSRMTIGKMIELLGGKAGVSCGRFHYGSAFGEPSGNADKVADISSTLIKHGFSYNGKDFLYSGILGQPLEAYIFMGPIYYQKLKHMVLDKMHARASGPRVLLTRQPTEGRSRDGGLRLGEMERDCLIAYGASMLIFERLLLSSDPYQVQVCRKCGLLGYYNHKLKTSYCSMCKNGENMAKMRLPYACKLLFQELHAMNVVPRLKLTEV

SEQ ID NO: 71337 - protein, 579 aa, Zea Mays
MGDRSGNIRWWDVTSGLSSSFSTHREGIRRIKFSPVVHGDRSRGRIAVLFYDNTFSIFDLDSPDPLANALLQPQSPGTLVLELDWLSTRTRKDEPLMLCIAGADSSFRLIEVNIDAKGSSISKPVATKERFRPMPFCLPVLFPTAHALALRMILQLGVKPSWFECNSSDKLTGDSFKVAPTFGDLRSYMIETTLPPIGDAVVAELLLKVLEPYRKEGCILDDGRASLYSAIVNKGACARFAFAAAIFGDFQEALFWLQLPQALRHFLGKSTSRSREKISQSSLHPDSEQSSRFNRIASRERSASEKSSIFVQNYGQLSSMAFNQEQLWFNASERIPWHDKLDGEDALQKHVHELVSLGNLEAAVSLLLSTPPEGSNFYPNALRAVVLSSAVSQSLHELAVKVVAANMVRTDKSLSGTHLLCAVGRYQEACSQLQDAGCWNDAATLAASHLHGSDYARVLQRWADYVLRGEHNMWRALILYVAAGALPEALDTLRKSQRPDTAAMFLLACHETYSQALSESEPEDDTSVLALTPTPEQTEKLRFPSKNVADEDLIAVSEVFGQYQQKLVHLCMDAEPTSD

SEQ ID NO: 71338 - protein, 92 aa, Zea Mays
MYVDDILLSNCDKKLLLETKRFLSLKFDKKDMGEASYVLRMAIHRDKQRYIKTSTENIHKKYILKRYHMHKWYHILQLSETLFMLKFVLALT

SEQ ID NO: 71339 - protein, 93 aa, Zea Mays
MQASPPTQDKDQAQEDGNEDQEDEPPQEEDNDQGGEANNQDKEDDEGPRPPHPRVHQAIQRDHPVNSILGDIHKGVTTRSRVTHFCEHYSFVS

SEQ ID NO: 71340 - protein, 267 aa, Zea Mays
MASAAGSAGGAGAGSGGLKTYFKTPEGRHKLQYEKTHSPAVVHYSHSGKTVSQMTVAYLKEKPAGQGSTPSTPSAGSGMRSAAARLLGTGNGSRALSFGSNGTSRAVSGSSRMGGGIGVSTSASGSQGMANYDGKGAYIIFNTADTLFISDLNSHDKDPIKSIHFSSSNPLCHAFDPEAKDGHDLLVGVFSGDVYSMSLRQQLQDPGKKPVSYQHFVNRDKDKDKDPSQGGAASSRSTCVAWVPEREGIFVVSHADGNLYVYDKVSP

SEQ ID NO: 71341 - protein, 96 aa, Zea Mays
MLMLTITACTQSRAFYRVKGQLENIPLHQALCPDEPLLVRAARGEDGIPHWMMRQAGRYMAEYQASAKGKLTFSHRVRGAPSCEVLRYIAIVCFLQ

SEQ ID NO: 71342 - protein, 63 aa, Zea Mays
MLRRGAQAHRRSTTAGLVDEHRSSDSDLMTWFRSAYPFGLGATRPLITCAMIGIRLAIAFMMG

SEQ ID NO: 71343 - protein, 480 aa, Zea Mays
MEFESEDAARDFYSTYARSAGFRIRISRYTRSRRDNSVISRRIVCSKEGFHETRACDGLHPEQKQQERAGTRVGCKAMILIKKFSPGKWVVTKFIKNHNHGPVPPRKLDSRLVDQDCDPMEKPHSIEVDPVEEPFEGMEFESEEAAKLFYVNYARLNGFRARISRYCRSRRDNSIISRQIVCSKEGFREVRTKKVLTDEGKTKRPRMITRVGCKAMIVVKKMNSGKWMVSKFEKEHNHSLSYSKMVPSTSNITSGEIVDLAAKGAHPSEVKNEGYSAGTQCNPADSLTILYNNLCQEAIKFAKEGSVTEEIYHVAVSALKEAAEKVAEVKRSRPTLSHCGFVRESKHDVLQEKSMSALQCSNQVELTRTSPGSRPLQDSASNLLLIPTDILTDSRLYSGVDTAPLTGGFPTNGKYAMRVKVHMHQKVLLCILRTQRKPLQKNLRTLVLINSSMERSKVSMDLLKIPWLLFLRYLLHCACL

SEQ ID NO: 71344 - protein, 474 aa, Zea Mays
MVNSCAPAAFLHSSASWQALLVFFISVTAVGAADAGGQDAGGQGPCPHFSCGDLGNISKPFRRPGDPEECGVKAYELVCSNGKATIRINTGTYFVTSINYTNRSFWVVDANLDMHSSCPLPRWDQFPYTSEGLFWRSDIIQVVKKGFSVGFPKDEYDYSYHNTSWIFKTCLNNFTRYFHEQLSSGGIVGITRAFFWSDVFLLKCAESYNATTVILDFDVISVVTGVKITTLLVLFRFVFTALAVQMFLAHKYWKTTIAIDAVEKFLHMQQMLGPTRFAYTDITAITGHFRDKLGQGGYGSVYKGALLSGNMHVAVKMLGNSNCNGDEFISEVSTIGRIHHINVVRLVGFCAEEMRRALVYEYMPNGSLDKYIFSAERSFSWDMLNEIALGIARGINYLHLGCDMQILHFDIKPHNILLDSNFVPKVSDFGLAKLYPRDKSFVPASAMRGTIGRAKERRPKCSQLKPSILPSLGL

SEQ ID NO: 71345 - protein, 76 aa, Zea Mays
MLRRARLAPSSVHVRAVRATELLPACAAPSQGFPLRAPSNRRVPSLPVKLLPRARIRSLMLSHVFFPQLRHLSRRP

SEQ ID NO: 71346 - protein, 438 aa, Zea Mays
MDAAAVHKRKRPEEADPSAGELDLSAADAVETPRSRSTPRPTASASLPARLSSSPTSSPSASPLPSPPFSPTTMSISQLPPHHSSPTSPTPRTPPTSPLSRPSPTRSSTPTRSTSSSTISPAFPRPTPMRPRPCTTPSPSSRTSSTSAPTSPTKSAAEPSFYDGSSRASRHASSTPTSSTPPKSSRYSCRTAPPIRSASARSTESTPCFRRLPCTNQGTQRRLTRRRCSRTSSTVSAACSCPLDFAMTKFPPACERFVDVLGLKTAFAAFMGKIPVNKKNKKESYQEELEERIISLIASLFGSRRMRLLGKFVENECEKIDRLMELYTRYSDRVKEETERLDSLDLEDLEMDDDERYNRKLEAGLYTLQLIALILGHIWHSGNSQMRARVELLLKQNKLTKQDVKSILEEYHDNIGDLDGPEEKERAQVRTKEIIDAL

SEQ ID NO: 71347 - protein, 208 aa, Zea Mays
MTLQQILARAVGYDAILNGSHVVNFTDDGSKVTAILEDDRIFELPYWRTVEYLKVRKTLFGHSDATYSGYTCYTGIADFVPPDIDTVGESANEYTDDEDASWKVRRASSKCLSAIIVSRPEMLVKMFLEACPKLIERFREREENVKMDIFNTFIELLRQTGNVTKGQGDIDESSPRWLLKQEVQKLSSLSTGSYVKNQSRQRLGHFQY

SEQ ID NO: 71348 - protein, 68 aa, Zea Mays
MPKALYWICQRATRPLATHHRLSAPQAYFPLCTSPQTLSHHAYVLSISSLFRASSRNTKRRVKTKLAA

SEQ ID NO: 71349 - protein, 53 aa, Zea Mays
MTRKTTGNKTLSTELLSKTNPTKEKTLKGMLDLGIKEMLLARINLNTFAEIAY

SEQ ID NO: 71350 - protein, 345 aa, Zea Mays
MAAAARAALPRPHLSLFSSSHRSPHLSLTPSSAPRLRSGAATSPALQQHHQVTTRLGDVIEAQQFDRDALNEIFEVAREMEAVERGSHGAPSRVLEGYLMATLFYEPSTRTRLSFEAAMRRLGGEVVTTENAREFSSAAKGETLEDTIRTVEGYSDIIVLRHFESGAARKAADTANIPVINAGDGPGQHPTQALLDVYTIKREIGTLDGIKLGLVGDLANGRTVRSLAYLIAKYQNIKIYFVSPDVVKMKDDIKNYLNSKGVEWEESSDLLEVASKCDVIYQTRIQKERFGERIDLYEAARGKYIVDKKVLDVLPKHAVIMHPLPRLDEVKDSYHRMRRMKEKTS

SEQ ID NO: 71351 - protein, 129 aa, Zea Mays
MQGCRGRHQRHPPAIPADCLACPSILLPTPPSILARALRTHSIHASLQQQTPIPVVALASLLFVASASASTPLFDAFAADSDFWCTLFSTARARAALAMASTGTRRSYRSSSSRVVRGSREQHAGIRRS

SEQ ID NO: 71352 - protein, 56 aa, Zea Mays
MSIHVYVLLCIENEEVAPQAEISPVENNFYLISVGQTLSLLQHKASPGAFTPFLVV

SEQ ID NO: 71353 - protein, 86 aa, Zea Mays
MLLPFLHLLHTTLQPRCNHQEVALPLLEQLLVEWLLAQPCYLLFLLSVLPIGGTGNHKSIFSMYMASKLVFDYYLSCNIRANNVYM

SEQ ID NO: 71354 - protein, 471 aa, Zea Mays
MYASRSRHFLLSVRTANHGILLRSPTSYVSPTGCGVSAQRHYNHQQREDEWEESKAVKVTVWWDFQRCRLPRRASPRHLSPRVTEALRCAGIRGPVEITAFGDVSHIPLTEQEALADTGVILSHVPSNGCGRSFMSDLISWIAQNPPPSHFFLLSGDKDFTNILHRLRMSNYNVLLSCPDSGSKMLRSAATYLWTWEDLATGVDLKPKYLNHPPDGLSNSWYGQYSEPGRDFLLKPKNPMALPRKTKEPKVPRFAVVGIKRVLWFYPQGISVSELRKELKRINVYIDASAFGFKDFSAFLLSMSDVVKFIDPLPDDGGPAVVGVFKRSEDSAQSHIQEKCHKEGESEEPSPRPKKRTLQVEVPSSPPDESSRDNRKAPGSTQRPEPPSIHVEADVTRTVEVPSPPSDSPCMDQRNDVAVDPVMQTERPVNLMEADKANAAGGPSSSGGQGNISKKRGFLERISSLWNGQKD

SEQ ID NO: 71355 - protein, 132 aa, Zea Mays
MFLEERQLHGDFVTKISDMVWRRNGGNVDAVEATTDQGNAVDVAQPEDVREDVVDDGMLRLAATRGWVPGDSSPPLSKRLSAKDWQNERDKRKELNLLKYEALKDELLLLTTGIGAACSLYCLLVFSLELKF

SEQ ID NO: 71356 - protein, 534 aa, Zea Mays
MILYSSNKNVDVQMGALKILLHVLERHGEKLSYSWPSILHMLRMVTDASEKDLISLGFQSIRVIMNEGLATIPVQCLDECILVTGAYGTQKTDINISLTSVGLLWTATDFIVKGLVSKPIEQASHMNDDVQSCEMTEEANSKQVPPKLVDYSILFFSVFSVLQKLGSDDRPEVRNSAVRTLFQTLSIHGQKLSKSMWEDCLWLYVFPMLEHVSHLASTSSRDEWQGKELGTRAGKAVHMLIHHSRNTAQKQWDETIVLVLGGIARLLRSFFSYLQQLRKFSSGWVLLLSFIKNSILNGSKEVAIAAINCLQTFVGANCPKGNLESSYVKSVLDIYELVLQTSSNFKNDSTDKVKQEVLRGLGDLYVQAQSLFTGDMYLRLMAIMHLMIKTTLNPTDYDSELGSIPAVQRGILEIIPMLRPTVVLSPMWTHLLLELLCYLNGHEGPLQKNNEQTPDHNSQALVDGAKHALVERSNLNGGGTKLDMVGSGWGILFVEKLVPIIANLFLEAPPNERFSVSPEVIQGLGRYLLFMIYI

SEQ ID NO: 71357 - protein, 626 aa, Zea Mays
MATTAHPALPLLIVLACAGAASGFYLPGVAPADFRKNDLLAVKVNQLSSIKTQLPYSYYSLPFCRPDTIVNSAENLGQVLRGDRIENSPYVIACKVVLTEQGAKDIMEKIHDEYRVNMILDNLPMVVPIERLDRDAPPFYQQGVHVGVKGHYAGSNEFKYFIHNHYSFLVKYNKDAQTDLARIVAFEVKPFSLKHEFDGDWKGNATRLKTCNTQSEHLIVNSDGPEEVKANKEIIFTYDVNFEESSIQWSSRWDTYLRTPDDHWFSIVNSLTTVLFLSVMVAMIMLRTLYRDISKYNQLEDQEEAQEESGWKLLHGDVFRPPANADLLCVYVGTGVQFFGMLLVTLLIAILGLLSPSNRGGFMTAMILLWVFMGLLAGYSIARLHKMFGGLEWEKVAIKTVLVFPGVVFVIFFALNRLLWGVKSSGAVPFTTMLALVFLWLGISMPLIFVGSYLGFRKPAIQGPVRTNKIPRLIPQQPWYMNPAVSVLVGGILPFGAVFMELFFILTTIWMHQFYYIFGFLFLVFVILIVTCAEITIVLCYFQLCSEDYQWWWRSYLTPGSSALYLFLYAAFYFFTKLQITKAVSGVLYFGYMLIAAYAFFVLTGTIGFYACFWFTRLIYSSVKID

SEQ ID NO: 71358 - protein, 476 aa, Zea Mays
MSCRSRYEFAVYHKTSSHKPSPYLIANLRKHEALQKRCGPGTAAHKKAVRRLDSGEGVVDDDDGCRYLVYISYRGLGNRMLGITSAFLYAVLTERVLLVDGGKDTGALFCEPFPGTTWLLPQAGWFSFSPLSRLQGYEGGSKENLGDMLQSGGITVSADGNVSWSAPRPPLYLYLHLSGSYGFHDKLFFCDAHQRLLGEVPWLFMWTDNYIVPGLFLTPAFSDELEAMFPEKESVFYHLGRYLFHPTNRVWHAIKSYYHANLADVDQRVGVQIRVFQKKQPPRFVLEQILSCLRDVKLLSGTKTDAAGGGNGTSSSFSRAVLVTSLSSWYYDRIRDEYGGRISGGVHQPSHEGRQRWRDAAHDMRALSEIYLLSMCDVLVTSGYSTFGYVAQGLAGLRPWVMPRAPMWAADWREELDPRDMPCRRADSVEPCFHAPSAYRCAAGRDVDLGKVSPYIRRCVDVKYGINLVNESSGQW

SEQ ID NO: 71359 - protein, 404 aa, Zea Mays
MVAPAGAERSGGGGANAGGAERLIVDAACQLAAHDHDVHVFTSHHDKKRCFEETLSGLFPVTVHGDFLPRHVFYRFHAVCAYLRCIFVALCVLLRWPFFDVILVDQVSVVIPLLKLMASSKIIFYCHFPDLLLAQHTTMLRRLYRKPIDMIEESTTGMADLILVNSKFTAATFARTFSGLHARGIEPGVLYPAVSVEQFHEPHAYKLNFLSINRFERKKNLDLAISAFALLRSAAWTLPGDALQEATLTVAGGYDKRLKENVEYLEELKRLALTEGVSGQVNFVTSCSTSERNELLSNCLCVLYTPKDEHFGIVPLEAMAAHKPVIACNSGGPVETVVNEVTGFLCDPSPAEFSKAMLKLVNDHDLAVRLGEQARDHVVQKFSTKTFGDLLNSYVLNIYHERME

SEQ ID NO: 71360 - protein, 830 aa, Zea Mays
MESLSSGGELARRQSSGGGSSGWGSFSGDADPFDIPAKGAPLERLRKWRQAALVLNASRRFRYTLDLKKEEQKEEIRRKIRAQAHVIRAAFRFKEAGRIHVQSEETKVPCADGALGFGIKEDQITALTRDHNYSGLQQYGGVSGVAHMLKTDTQKGISGDDSDLLARKNAFGSNTYPRKKGRSFLAFVWDACKDLTLIILMVAAAVSLALGITTEGIKEGWYDGASIAFAVLLVVFVTAISDYKQSLQFQNLNEEKQNIRLEVVRGGRRITVSIYDLVVGDVVPLKIGDQVPTDGILISGHSLSIDESSMTGESKIVHKDQKSPFLMSGCKVADGYGTMLVTAVGINTEWGLLMASISEDSGEETPLQVRLNGVATFIGMVGLSVALAVLVVLLARYFTGHTYNPDGSVQYVKGNMGVGQTIRGIVKIFTVAVTIVVVAVPEGLPLAVTLTLAFSMRKMMKDKALVRRLSACETMGSATTICSDKTGTLTLNQMTVVEAYFGGKKMDSPDNAQMLSADVTSLIVEGIAQNTSGSIFEPEGGQEPEVTGSPTEKAILSWGLKLGMKFSETRSKSSILHVFPFNSEKKRGGVAVYLAGSEVHIHWKGAAEIILDSCTSWVDTGGSKHSMTPEKVAEFKKFIEDMAAASLRCVAFAYRTHEMDDVPDEDRREEWQLPEDNLIMLGIVGIKDPCRPGVRDSVRLCQAAGIKVRMVTGDNLQTARAIALECGILDDPNVSEPVIIEGKTFRALSDLEREDAAEKISVMGRSSPNDKLLLVKALRARGHVVAVTGDGTNDAPALHEILVYQWGFRELKLLRRVLILLSWMTILPRS

SEQ ID NO: 71361 - protein, 76 aa, Zea Mays
MDIQSKADQSTQSACTLSIIAIELWFLLFLCTIPKNRRHALCQQSMAVYYNKRTLKVSSDEMLYELYVNEEMEGMM

SEQ ID NO: 71362 - protein, 513 aa, Zea Mays
MPPLHVPGSSTPRKFYHLVLFHVHPFWIQVLYFLLISVLGFLMLRVLPMKSSSVPRPSALDLLFTSVSATTVSSMIAVEMESFSNAQLLLMTLLMLLGGEVFTSMLGLHFTCTKLRNKRETPHNNLHGNSLEQSRRRHRPMEMEAQAAAVQMELAGFNKDGHGDFASMARLLMFIVLGYILVVHIAGYALILIYLSVVGSARAVLVRKRISLSTFSVFTVVSSFANCGFVPTNEGMVSFKSFPGMLLLVMPHILLGNTLFPIFLRLSITALERVTRWRDLCELLRDRGPGGGPAAAAAAAAIGYDHLLPGPRTWFLALTVAVFLAVQLVLYCAMEWGSGGLGGLNAFQKLVAAVFMSVNSRHSGEMVVDLATVSSAVVVLYVLMMYLPPYTTFLPVAVEDDQQQQNEAQPHDNSTSKSSTSISIWHNLLMSPLSCLTIFIVVICITERRQIARDPINFSVLNIVVEVISAYGNVGFSTGYSCSRQAQEVQHAWGSGMEAELNRSTISKLARST

SEQ ID NO: 71363 - protein, 430 aa, Zea Mays
MGIGVVTRSKRRRLDEEQRLADRISSLPDDVLGEIVSLLPTRAGARTQVLSSRWRHIWRSAPLNMDLHPDGPEWRHMPVEQIRRVLSAHPGPGRRLSVPSRFGYLHWMDGWLRSAAALGPRQPPGARTELTQPSSSSLVGLAHAAASAAIGAPLLVHPPRRLLPRLRVSDQCQGPRPSPQPVRLPRLQQLTLSGVTISEGSLHAMLAGAPALRSLLLLDSNGFARLQIASCSIENIGVRSRCRGAKLQHLVLEDTPSLKRLLLFEGTNHMDISVVSAPRLDVFGKLCDDATKLKYSSATTDLQGSPTVSVLHSVKLLALSSVRISLHALIDLLKCVPHLEKLYIEASSVCVRNGSYHKYRKHIGTLCVRLRRVVLGGYLGSKPHVNVAKFFVSIARALESMRLESWVIISKAWLARQHRLHAQQQEEGVV

SEQ ID NO: 71364 - protein, 87 aa, Zea Mays
MPRRATISSLSYVPCSTLCLDGPVLVNCYGKISQLNIDQLEVSPCLFISIMVSLPQQVNLLVRKGLAGCCPVGFALVSLRKIRFRLV

SEQ ID NO: 71365 - protein, 60 aa, Zea Mays
MSTTRPGRHRLEAAARTARRRTTILGKIDDVMGIRAKRAERTRWRAENRTRAALNPNTAR

SEQ ID NO: 71366 - protein, 318 aa, Zea Mays
MASAAGAALCPCSFSTVLSSSPSTPFRPARTTPRPSLRPLPRRARLPLRPGHSVLRCLPKCDSGKPDGGGDAGLSGRKAARPAGQGGPRRPAQFGASSCGLAFTTVAGVIMLQASQQALAATQFAGLQPADVLGDLGDVSTGFASAFLLIFFSELGDRTFFIAALLAARSSGAVIFLGTFGALAVMTIISVVLGRAFHYVDGIIPFSFGGTDFPVDDIAAACLLVYYGVTTLLDAASGDDEKINEEQEEAELAVSKFSGNGAGVMSAAGTIASTFVLVFVAEWGDKSFFSTIALAAASSPLGVIAGSLAGHAIATLVR

SEQ ID NO: 71367 - protein, 251 aa, Zea Mays
MAASPACAPGLISGPTLPPLPVAFRCYWAQKPSSASTSSRRPCRRRFVPVAAASTRTSSAAARGLDADDFRHPLDKQNTLLLRAIPGLNDVGKALLGPVSEQVMVLQNIGTSVLVSPNQLPDLHQLLVEAAKLLNTEAPDLYIRQNPVPNAYTLAINGKKPFIVVHTSLVELLTPRELQAVLAHELGHLKCDHGVWLTFANILTMGAYTVPGFGMVAGFLEEQLYRWLRAAELTCDRAALLVVQDPKSSLF

SEQ ID NO: 71368 - protein, 175 aa, Zea Mays
MTGEKILFSYEKNEDPQRAITFGDGNQGLVKGLGKIAISPDHSISDVFLVDPLDYNLLYVSQLCKMGYNCLFTHIGVIVFRRSDDSIAFKGVLDGQLYLVDFNDSKVELDTCLIAKTNMGWLWHHRLAHVGMKNLHNLLKGEHILGLTNAYFEKNMICSACQAGKQVGVHHPHKT

SEQ ID NO: 71369 - protein, 328 aa, Zea Mays
MASVAGSGGGASAGAGGLKTYFKTPEGRHKLQYEKTHSPAVVHYNHNGKTVAQMTVAYLKEKPAGQGSTPSTPSAGSGMRSAAARLLGTGNGSRTLSFGSNGTSRAVSGSSRMGGGIGVSTSASGSQGMANYDGKGSYIIFNTADTLFISDLNSHDKDPIKSIHFSSSNPLCHAFDPEAKDGHDLLIGVFSGDVYSMSLRHQLQDPGKKPVSYQHFVNKDKDKDKDPSQGGAASSQCTCVAWVPEREGIFVVSHADGNLYVYDKFKDGNTDWTFPTVKDQSQVLISHAKSRQSNCKVAHLSRCNQWHFLFTGWCLLGNCWARWLFKSI

SEQ ID NO: 71370 - protein, 590 aa, Zea Mays
MEVDDDVEEDDIDFNPFLREGSPSETSSSLTSEAECEEHSSENQPSNHTYQQNTVVNENTSDSALPQNRLSSQDAVNEMFPEETSTQVNIENDGHLNGLEKDVLASEAACSPTVQDPHHLSLEISEEDAICKRTRARYSLANYSLEELETFLQESDDDSGLQNVDEEEEYRKFLAAVLSGVGNDTQTFQGDENQDEDDNDADFELEIEEALESDGDENVENYHNTNPRKEKDVRRPQTRQRRPLTGMSGAGSDHQESNKTHLRPIVPYIPSALVTPAHAFGWQYANQNAFFPSSLVSLTRPPLACGFTYQQLGQLHVLIYEHVQLLIQTFSLCVLDSSKQDVANNVKKMIVELVGARDQALARSSPQRHIFFETQHLSSSFVSSDNLERQWIPLIKSPIISVLDVAPLELVLDYLSDVFTAVVKYRKSHVDGTADKTRRKEPLFPSAAINSCKQVNNVSQDRSNGVPTASPPSGQLQQKKSLAATLLENIKKDTIALVPADIARLAQRFFSLFNFALFPHKSPPSPMANRVLFTDAEDRLLALGILEYNNDWAAIQKRFLPCKSKHQKFFESNERHEMLSRAPSPRLVGP

SEQ ID NO: 71371 - protein, 128 aa, Zea Mays
MEIITTNTLGLMICCREAINMMRNQPRGGHIFNLDGAGSDGRPTPRFAAYGATKRSVVHLTKSLQAELQMNEVNNVMVHNLSPGMVTTDLLMSGATTKQAKIFINILAEPPDVTTLFQTSEKSLPSNP

SEQ ID NO: 71372 - protein, 503 aa, Zea Mays
MSLGAEVIELSSDEDEEPVPSTTALIHHAPSSPPDVKPHLLADVDVKPLLLLPPPLHPPGYGALVPVKTEEPVPVATVSSPPRALPPPRLCRQFWKSGDYVVARRNPDVAGPGGRNRLRINPKFLHSNATSHKWAFGAIAELLDNAIDEVNNGATFVRVNKFKNPRDGNPSLLVQDDGGGMDPEALRRCMSFGFSDKQSDAFIGQYGNGFKTSTMRLGADVIVFTQNQNNWVPTRSIGLLSYTFLMETGCDDVLVPTVDYQYDLTTTSYVQMLRHDQKLFSSNLAILLKWSPFSTEAELLKQFDDMGDHGTKIIVFNLWFNDDGDMELDFNSDKKDILITGAHKKVKTNSLDKIAAQNYVSTRLRYSLRAYASILYLHVPDTFRIILRGCDVEPHNVVNDLMYRECVLYKPQIAGLTESSVITTIGFVKGAPDIDVQGFNVYHKNRLILPFWKVANNSYGKGRGVVGILEANFIKPTHDKQDFEKSVLYQRLEFRLKEMTYEY

SEQ ID NO: 71373 - protein, 128 aa, Zea Mays
MNTLLKDQVERLKIENLAFQKKHDMLLCSHENLMDDYIMLNITHEVVIANLKFQQPHSCTCVQIETILPCPNAWCSPTSKSLFELESPRIYDIAYQELKEENERLRMSLTQLKRKSLLNLLKIIVMTW

SEQ ID NO: 71374 - protein, 86 aa, Zea Mays
MYLPSATFYRRNSRNPPLSPVRHRPMPVLMPPPPTSSNLCHSIGVCPALRRWKVTDAGMVRGHPSHPRPAPHNLLPLLRCVFIPPL

SEQ ID NO: 71375 - protein, 938 aa, Zea Mays
MVGPEMLVAATVNQVVRKINEIIGVAQGETKLCCSFSDDLEGIKDTLVYLEGLLKNAESNSFGSDRANLRHWLGQIKSLAYDIEDIVDGYYSSKEQYEGSNYAQKGSLLCSLSNPMLSKINLKELTIISIVGPVGLGKTTLAQLIFNDARAETFRFRIWVHVSMGNVSLQKIGRDIVLQTTEKIEGNMQMQSIKNVVQDILNKYSCLIVLDSLWGKDEEVNELKQMLLTGRKTESKVIVTTHSSKVAELISTVPPYKLSLLSEDDCSAIFCQRAIAGQSISDPLFREYGEEIVRRCEGMPLVANFLGSVVNAQRQRREIWKAARDKDMWKIEEDYPENKIVPMFPSFKIVYYSMPHELRLCFVYCSIFPKGYVIDKKKLIQQWIALDMIESKHGTLPLDVTAEKYIDELKDIYLLQVLERHQIDAEISNTSEEKLYMNNLAHDLARSVAGEDILVILDAENVRCNRNYDYRYAQVSTSSLQSIDSKAWPSKARSLVFKSSAELQHVSEVLSVNKYLRVLDISGCSVKEMPAPIFQMKQLRYLDASTLSIADLPPQISGFPKLQTLDLSDTEVTELPAFIANLKRLNYLNLQGCKKLKQLNNLDLLHELHYLNLSRCLEVRSFPASLKNLRKLRFLNLSQCSKLPTLPDELLQSFSSFSSIVDLNLSGFEFQMLPDFFGNICSLQFLSLSKCSKLELLPQSFGQLAYLKGLDLSFCSDLKLPESFKYLSSLQFLNLSHCHNVEYLPSFDKLSNLEYLNLSQCAGLKALPKSLSNQKNLQIEVFGCQDCIVQSCYLSPQSHTCSQEVKEVGSSSDISDTILKESANRDVALGISFPEIDEVGYPHNNLKQKLTLSYHMDGHKSEEPNFITKQNSTTETVQLTPRHQFPSSTCRISSIASSSSALFASGSSSDVSITYNPVSNDKAGNQTGPQTESTHTVV

SEQ ID NO: 71376 - protein, 216 aa, Zea Mays
MAPSRSRKFRTRPPISYSYALHNRDRINLLVSLKNPQIDLRRANNTEIMLTKIKMPLPDMMSAALALDDSVLDADQIENLIKFCPTKEEMELLKNYSGDKEALGKCEHFFLELMKVPRVESKLKIFAFKIQFQSQIRDVRKNLQTVSSACEELRSSEKLKVIMKNILLIGNTLNQGTPRGQAVGFRLDSLLKLIETRATSGRMTLMHFLCKRSHQK

SEQ ID NO: 71377 - protein, 81 aa, Zea Mays
MAAPLHAKLALLLCPTLARPSPSPWLPLLCFPPALAELAPALSSQGSPSVFSMAGTLPIFCRLEERIPVSVRRSKSQHNAC

SEQ ID NO: 71378 - protein, 109 aa, Zea Mays
MSVKNFPPTKLASAEGSFVSSIENAALAWARTFTCSHPAFSKIAAIPLAPEKAQTSPRPLKTSSKASVSPLIHSIGPSGSPSTKLSSFEYAPILAKLVFIFCTHATDFS

SEQ ID NO: 71379 - protein, 72 aa, Zea Mays
MTNIEQAMDRNPRDFCRWDVNMQQLKGTCSSCMRSFQNLKREHGVLRQKLESYFQLLRQAGPAVTATRPRGM

SEQ ID NO: 71380 - protein, 389 aa, Zea Mays
MLENQKQAEVLWPRLVANKLFRKTSGSHAFVADFPATDGDGDVVFGGTEFDGGGCSPDPDDADASRCVKRARPQPQPQERNKKTLKYKLFASTWNVGGVAPPDELDLSDWLDGGGGDDDDGPYDMYVLGFQEVVPLRARNVLGADKKRVGMRWIELTRAALNRSSSSHAQRGGGSGGGSGSGDGGGGGRQKVHPVRDGGGGGGLACRDYRCVVSKQMVGVLLTVWVRSDLRRFVRRASVSCVGCGVMGCLGNKPGDPSRGPQLQDLAAGGQDEAAGGAAGLEDAAGERPAARRGAPRRRVPGLERGAHRLLPDLQVLPQLRRLLRLRHRQRHRRRPPAQAARAGVVRPHPVARRGDPAGPVRPLRVPAVGPPPRARRLHGGGGRARARE

SEQ ID NO: 71381 - protein, 70 aa, Zea Mays
MSALTESSAALEFARASTTDDGSSCSSITGGGEKRRSQRVSHSSNLRLNSSSMSLTSRVMALTNLKLRIE

SEQ ID NO: 71382 - protein, 639 aa, Zea Mays
MAAEAPPSASASSSSAPRPPAAAASASGGGAAGSAESYIGSLISLTSKSEIRYEGVLYKINTEESSIGLRNVRSFGTEGRKKDGMQIPASDKVYEYILFRGTDIKDLQVKSSPPPPPPQAASLHNDPAIIQSHYSQPASTSSNLPSAGGAVLPDLSSQAVQYGLQRPTFQSNLPLYQPGNAPRGSSAAPPAGNAPWGSSAEPPAGTTLSVPSMYWHGYYAPSSGLPPHLQQPLLLQPTPGLSVPQNLQYPGLNPSLPSGMQKLSELQPSLMPPINSQGSSGILPTTTAPASATLLAPESSKPQVPNMGSLFTPATSLGATFPYPSQPTPVAETSATVSQNITSFSSNKATALPGSTLSYQTASQSVSSTIAPSSSAQVEMAVPLLASSGQLLQNTSSMLSSSHSMQAPLQVASKEVKPVEPKAKVAEPLLPDPLLPDPPSQSLPENKEPILPLPKQTPQKYNGSGLHNHHNFRGRGRGRGSAFSQSVTTFTEEFDFTAMNEKFNKDEVWGHLGKKSQSRDKDGEVGDDVFDEDLEVEETDNPELSVKPVYVKDDFFDSLSSGTFGRGGPNGRGRPSERRRVDTETFGEFPRHRQPYRGGARGYRGGGRSRGSYYGGRGYGNTGTGGPGNSYSHRGYGRD

SEQ ID NO: 71383 - protein, 84 aa, Zea Mays
MSIGDVCPKESEEPPNAQDQPSSSMQASPPTQGEDEAQDVEQEDQEDEPPQNDGNGRGGDANDEDKEDEQPRPPHPRVHQAIQR

SEQ ID NO: 71384 - protein, 82 aa, Zea Mays
MVGDPWDDEFKLMNSIALLSYTVHVHSHLRPLMARIGAHGPDNLGGLSQSPPQHLHNLHEELDGVTTKTSSQPSQPPGVTSR

SEQ ID NO: 71385 - protein, 2373 aa, Zea Mays
MDLAGMKRRELQALCKRHGLPAGGTNADLVGRLDAVLSGPAVVEEEVAGVPARKGCLKQTGGGATEAKKVTFGAEVGKARRLRSRVIWSPVVAKTRGKSARAGTDSAAEDGISADVGADVPVRRSRRNSFNPAEAEEAGEAVAVDRKPKRKNQENDEGVAVIAQARVTRRSNLEWSATVLPPAVEKKRGRQNAAESDVQKSALVEVTARTTRSRSIVPVVVPPTVVENKRRKTGDPQTTVELTMLSDVPRSDFPATRSLRNKIVHVNNSVVDETHTTRQLENKMRPSTRRHQQVASSPEDKGQKIPATSKSPLLRWSRRNYSEANSANSVNIKLAKDSSTAQPLAHHNSHSEDLEKQPAVKEPIKRSTRKSIALAALEKEKDVIEGKNPEAHVRRSTRKSVVQVKDTKSIVEETQYANSEDVAKQPATKGPARGLRRKSVITELHEKEKSLIAEKNMETDEAILTRKPVIPVKNIKAVGEGIQIGKGKDVDKQFVVKQPTRRSSRKSVLPDMLENNSGLLAPKMNAEMNVRRSTRKSVLPDMHNEKQDHHKMARNENLQSGKYQDGEKQQKVKDSIRQSRRSIATVLLEGQNNDEGKKFKNPTRRTTHKSHALNAVEEVSMDHIEVGEEGLKLRKRSRFLLEISSSANVSWKHQNAQISNEKDNTEGSQQASNCTTSKRRSSKKRRTTAPEEVMPFKVANDDIVIMEETKDTLEYNNESSSKVQEICQVNAAREEFSSGPLLVTVAPSDEICTVQSVAVVIPGSESGDDANQSSDKSKQPQEHSVTQTVDDHLSETRSGKLDQSTCITGLVSDNCVVSEDKTLMSEDREEQSPVSGEQRVSLEANANEPEEKNLANVTSTDLHTKSLQHDIDRIAKETDKDVLSLVFPIEEHEEKYGVSPIAVEKCVCREASACESARKPLTVIFSNNLHTKHLQHDCDVLIKETGEEVLAQENCNDQPVPAQTDQEIKLNDELADPDVLAQENCNDQPVPAQTDLEIKLHDELADPDHEEQSPVSGERRVSLEANANEPEEKNLANVISIDLHTKSLQHDNGRIAEETDKDVLSFVFPIEEHEEKYAVSPIAVEKSFRQEASAIESAGKPLTVIFSNDLHTKHLQHDCDVLIKETGEEVLAQENCNDQPVPAQTDLEIKLNDELADPDVLAQENCNDQPVPANEPEEKNLANVISTDLHTKTLQHDNDRIAEETDKDVSSLVFPIEEHEEKYAVSPIAVEKSVSREASACESAGKPLTVIFSNDLHTKHLQHDCDVLIKETGEDVLAQENCNDQPVPAQTDLEMKLNDELADPEVLAQENCNDQPVLAQTDLETKLNDELADLAMESGCSITERNEGLVAHNLDQEGFLEATPECKQECGLPEETVISSKETGSLLCADQSPIGLESLFSQESIVESVGHCALASATTHTENGFDDSKDCHNKSALENVHVPEPCSHNDTKGGIFKNVDCMHTSQRDDRMEGVPEANTDEEHVLSAFLLDANHLNVVINSEEVVCEGEDSKELLHSEDCKASSEKTDVNDGNVYGISDAVVRCALHAPADDNYEIFLGPNTDVPRQVYNDGCSDVKEDRFASKPWTIDIIEDASVKERSNLKDWQLDSKLEGTEIVESGLYFNKDIGNILHSGSIGEITPSGSGLSKDSSVDYRGEVLDGFSMEASLERSSTRGEQNGCRLDAIENPSITLATSGYKHEGALSEEAVYTKKNYAGTCLSNPRELIMELQSHFSKENINESDPHDSLVFPTAENSADEQLVKVHHGSNLSQLGLTDLLDGPIGCSNTDVLCQCDNHKNQSNEDKVEEVEAVSAAKYIESEVVLLPSQERSNLNNEQLNTKLESPNIMGSCLNCDNDVCNTSDNGSVFVIGKRTPSASGLPEDYPKDSDLQQPVLDSFSVVSSFQDNISGKKTVSGVAGSEILSLSLATPDYKHEDGFSEEAVCRTKNYTGTSSVDPRHLDMEGHSIYSEGGTEKSNLQDNLAFLSAESGKDEPIICHVEKLVDAHASSDTYQGPCQDLGRHEEQESCMSIPMQAKESGGVLRSSHTKGSVTAAQIDLAGDAHLIVSDNAAAKQVFSEEKEETKSISSSDIDILHEKSYSSGHDDHAACAAETQFYHPQKASISDGLHLGPSSLQVESLDALDSDILYVNTGVLEQHHKEGYYEPSVYQITSGICTMSEAEPFEVLETGKDVKTPSKLDEQLNPGLDGDEAEKHSLDCGTDTSPVMSKRTLSSPGSGPCQQYVNESTTSTQSTDNHPNDLPAPRSPEQSACFQNDNDSGSVGICQSSRRRGIDELCGKLQSFKVSSAVKGSYVAMGAPRPKPGDSTSRSAAALLRNIENTTAVKAGRPPVKPNADGKDSSRRALQPISGRPDSR

SEQ ID NO: 71386 - protein, 739 aa, Zea Mays
MRLRGMSRYPAPYPMIRPGFVPRPMPPPGVVPIQRPTIISGIRAIPPLVAPTARPPAPAVKLADKPPTAVYVGKIAPTVDSDFLLSLLRLCGSVKSWKRAQDPSNGKPKGFGFCEFESAEGILRATRLLNKLSIDGQELVININDATKEYLKKHVEGKKRAQEKEKETEDASGDGTTAVAENESSKPVPDELDETGDAGDKYREDNTDKFGIVTDEDSQTDKDVAEKISNMIEEWLKTRPPPPPSPVQPSADSSGVDKAKNDSDDKNAADADKRAANETERSETASPDKRKDREHDKDKRDKDLERHDRERERVRRDREKDHKHREADRLYRDRLKEWESREREREYQRYSEKEKERDRDHNRRREILKQEDESDDEDNRKRKRRSISSLEDRKRRRQREKEEDLADKIREEEEIAEARRLAVELQRQADEAAAAAAAAAEESASLMEIDGDDEKETDAQNKSAVVEADNISSFANGVGAGRLSKGNNGEETCMTPGQTADTKQNNNVPAKKLGFGLIGLGKRTSVPSVFAVEDDENNVDKSIRPLVPIDYSTEELQAVHANSSTGANVTAAAEFAKRISVSNSKEEKAEAEKDRNRRSSEARPNDERREKLHDREKDKPKSENKKILDAKQLIDMIPRTKEELFAYDINWAIYDKHELQERMRPWISKKIIEFLGEEESTLVDYIVSCTKDHVQAEKMLDLLQSIFDVEAEMFVLKMWRMLIFEIKKVESGLSGRAKS

SEQ ID NO: 71387 - protein, 72 aa, Zea Mays
MLLEVIDSSVIALALDLRLEQLLVFCRGMSSSLQLSALLQSITNRGGSCFKTVEQIAKVHMGATAVGAVAPV

SEQ ID NO: 71388 - protein, 342 aa, Zea Mays
MDGGSSWLPFLGRGIGDGVSGSRSSGSEVQRKEDDDLPISSQVEEELRQFYLLMGMERTGHPAERETTTALPPSSESSMFRSFPGSPADEASSLRPRSSNNNSTTANSYHHHPAEVSSQSHLTELSPVTYGGGHRHCDDHQCYVNLDTILKLDDEFKRCHDEQPHNERAQHKNGFRGGAFVPYTRHLGPKKKPKPPAGSGGQRAIKAAMAALARMHMVRLAQWQCYQMELVVAPAPPTGGINGNNQQQHVLSERKRREKLNDSFKALRTVLPPSSKKDKASTLMRARDYVSTLQSRVSELEEKNRMMLVQLQHRRNDVSPNKIEVDIRSNREEIRKHDRNFT

SEQ ID NO: 71389 - protein, 147 aa, Zea Mays
MAASCRGPCCSLLAACSLLPCALAVGISCRACCLPALDARCFPQLGSCQPPFFGPCVGRRRGVLFSRLVVDLAGCRHSSSRRVCSNVVDSSVVLVDELRFIDSSPSVLTGFVSLLELALTCSTTPHQLAPVSLSSSFHASLRKTRVG

SEQ ID NO: 71390 - protein, 101 aa, Zea Mays
MLRRRICRRPQTRTAAPSLVADLACGPARVVLPILDSLCASHVPIVNLEAALCTACSLNPCVRLVRSAAFFSFSPSRPPREIPGRRAMHVNASKKNGSGFG

SEQ ID NO: 71391 - protein, 107 aa, Zea Mays
MGRIPRSPKADLKKVSKVKVLSKVKLLSKIMVLSKLKLLFKLVQVEVSLPVQSPIIRTRESILQDNLISSARAEPMSQAPSWTSPHGWPPGAGPRLELSDVRSFRCL

SEQ ID NO: 71392 - protein, 74 aa, Zea Mays
MVFNEWFKPDSLVEISAPSQFEHGTLNNCVMWRTAQVDPRKMWRLDISARRRHQSDQPEDGQTKQVSGQRMVVK

SEQ ID NO: 71393 - protein, 389 aa, Zea Mays
MAAAPAAAGGLMQLQPPLCVSPRASASCAPSIWGALPQLRRRRALARAASSVAAGEAEAYTEPELVLLEALLGIQGRGRAVAPRQLQEVESAVQALETQGGIPDPTSSSLIEGSWRLIFTTRPGTASPIQRTFVGVDSFRIFQEVYLRTDDPRVVNVVKFSESVGDLKVEAEATIKDGKRILFRFDRAAFAFKFLPFKVPYPVPFRLLGDEANGWLDTTYLSHTGNIRISRGNKGTTFVLQKSADPRQILLSAISARTGVEEVINDFISSQNGTKADLSILVGEWQLLWCSQTEGESWSSVASAGLKDFQIIREDGKLKNSASPFPGLTLNATGNICKNGSGNTFTMSMKEGAVKVGGLQFPLDAQGEFVMEILYGIHVFLKLKYEAYT

SEQ ID NO: 71394 - protein, 459 aa, Zea Mays
MGNSLACFCCGGGAAGRRRHVAPAALPSDPAYDEGLGHSFCYVRPDKVLVPFSADDDDLVADAKAAAAAEEPTTFRAISGAALSANVSTQLSTSVLLLLPDESSSAAAASSSSSGFESSESFAAVPLQPVPRFPSGPICAHGGGFLSGPIERGFLSGPLDAALMSGPLPCAATSARMGGGAVPALRRSLSHGGRRLRNFTRALLARADKFQDSMDLGSAAAAACGAGSAGLQWAQGKAGEDRVHIVVSEERGWVFVGIYDGFNGPDATDFLVSHLYAAVHRELRGLLWDQCEQEEQRDTDPDQPMSTTASYHQDQPANGRRARRSRPPRGADDDQRRWKCEWERDCSSLKPPTQRPPRSSSENDHLAVLKALARALRKTEEAYLDVADKMVTAGLCWEQWTVLISRRSVGVHLMDWSGMALRSCQLCSSPQNIARQCERKFAEYGTSIPETRLQSPRTA

SEQ ID NO: 71395 - protein, 53 aa, Zea Mays
MTTWRPALCVGTGSVCPSLSLFISITLRRNQYLTPSCGRPSSSPSHHVITYRT

SEQ ID NO: 71396 - protein, 518 aa, Zea Mays
MRDPFDAPVDLINPDHNGGNKLSRTGAVSAGDYGLQNGPKSFAPNSDTLVRHQVQVASLHKDLVLEDPNTRIMDPETKELYFRSQSQGDEILLLRKKIAEASLKELRLLGEKHILERRLTDLRMAVDEKQEEAISGALQQLNQKKTHLEDNMRLANELKVEEEELYFFTSSLLSMLAEYNIRPPQINASIITTVTKRLYQQMHLKLRSLNDNLGDMTQPGNIYNPNLQQVTLSRNEPSPSYNLDSNRNTLQQYAQGPSDRHMDQMDTGGTTPSNYFEGDRRVDGDSQLYQPDGDALPGIEGFQIAGEPRPGFQLTACGFPTNGTTLCNFQWVRHLENGTRQSIEGATMYDYVVTADDVGTFLAVDCTPMDDNGRQGDLVTEFANNGNKITCDPEMQSHIDAYISNGRAEFEVFVLAYSPEEWELATLVLTRPNYQIKFKKTGEAIIDEKYSQSLQMKIPNGRTTQFVLVTAGATLPFNTQGISEPNNEDYDVRLRDLIVLVMRTFQKKALDAKRKVNT

SEQ ID NO: 71397 - protein, 242 aa, Zea Mays
MAMAARLLRATEVASRFLSASHGFVQRAAYTAGGIVDVGQPTPQSHPELLADGEITPGITNEEYISRRKKLLEVLPEKSLAIIASADQQMMTDVVPYPFRQNGDYLYITGCTQPGGVAVLSEETGFCMFMPDTNKEDLVWQGETAGVEAAVDFFKADKAFPLSQMQKILPELIEQSKGVYHNVNTTSSYKNLDAFRRASLNNKVKDLTNYTDELRWVKSKSEIKLMRESASIVSQRGKPVGS

SEQ ID NO: 71398 - protein, 245 aa, Zea Mays
MWSYPLTNSTADLEATQRFLDFYSGWILEPLVFGDYPSVMKKNVGSRLPSFSKVQSEAIRGTLDFIGINHYYSFYVNDRPLEKGIRDFSLDIAADYRGSRTDPPIGQHAPTSIPADPRGLQLLVEYLSEAYGNLPIYIQETGYATTNGSLHDTDRVDYMKTHISSTLAALRNGANVKGYFAWCFLDVFEYLSGFMSQYGLYRVDFEDEALPRQARLSARWYSKFLENKGIHVEDELDDAGSHVEQ

SEQ ID NO: 71399 - protein, 62 aa, Zea Mays
MLATTSALPRAGAESLGYGGPQPRCALAKRVTPASATDRHRRACTRASGQARRGRPALATRG

SEQ ID NO: 71400 - protein, 311 aa, Zea Mays
MDREWGSKPGSGGAASAQNEAIDRRERLRRLALETIDLAKDPYFMRNHLGSYECKLCLTLHNNEGNYLAHTQGKRHQTNLAKRAAREAKDAPAQPQPNKRKLAPRKSVKIGRPGYKVTKQYDPETKQHSFLFEIGYPEIEDNCKPRHRFMSSYEQKVQSWDKRYQYLLFAADPYEIIAFKIPSTEIDKSASKFFSYWDPDKKEYLPRPPEGSKPPPAPPGTLPNGTGAPGAPPRPPGQAPPPPPPQIPPPPPAPMGMPPRIPPPPIGAVQPPPPPARVANGLRPMIPPPPNFTPGAPPPRPPMQGFPGQQQ

SEQ ID NO: 71401 - protein, 63 aa, Zea Mays
MCSSTSMIRFPIARYLRRSLELLVVLNPASLQLAVIPCVIKKSRELGEEAILVWRSTNIRHTS

SEQ ID NO: 71402 - protein, 313 aa, Zea Mays
MGTCGRRVLGVWFFFWFLLTLEQCTSLNREGAALLRFKAAIEADPYGALLDWNQESLSPCTWFGVECSDDGLVMSLSLANLGLKGVLSPELGKLMQMKSLILHNNSFYGTIPREIGDLQDLKMLDLGYNNFSGSIPSELQHILSLEFLCRFLEGNRLSGRSPVGVHQLTRICEHENQVPTTTTRIVTIKIRRLLMSKQKDFKMVNITGHPIRFPLNSPAAPSPSDPIPPPPAPPSPSEPIPPPSAPPSQENKSKSSATLYASIGAVIVFFMVASSALCFFYYCRKKTSTVVPLSANSSSRQLQTTTMEGCLMC

SEQ ID NO: 71403 - protein, 398 aa, Zea Mays
MEEELSLNMEKELHLLDNLEPPSKIEKLRIRGYRGSQLPCWMAKQSDSCGPADDTHIVMQRNPSEFSHLTKLVLDNLPNLEHLGELVELPLIKILKLKRLPKLGELLTTTTGEEGVEAQCCFHHVSTLVIIDCPKLVVKPYFPPSLQRLTLEGNNMQLVSSGCFFHPRHHHASHAHGDESSSSSYFADETGTHLERLELRRLTGSSSGWEVLQHLTGLHTLEIFKCTGLTHLPESIHCPTNLCRLVITQCDNLRVLPDWLVELKSLQSLEVRLCDALQQLPEQIGELCSLQHLTISSLTSLTCLPESMQHLTSLRTLNLCLCNALTHLPEWLGELSVLQKLWLQGCRGLTSLPQSIQRLTALEDLLISYNPDLDRRCTEGLGEDWHLVSHIQNLRLRD

SEQ ID NO: 71404 - protein, 270 aa, Zea Mays
MASDTEGIAALFSMYNDDEEDEDADEPNPPSPAPLTTVTSSSPLSPQAGGEDPNPSLAPPSPPRPEESASLKTLVSPHPSPARALLPPLPSRRSSSPFAASPPSPLRGPSSAPPADLPRPPRRGALAIVDYAHDEMAMSPEQEDGEIMSHTYRFVSDAQAAEGNLEERTLSGTVHIMTPNTPAELSQHADAPEQNQLGTDMAVDITRAEIEDAQVEETTDISTNGENDDPLSRFLPPPVTTKCSAALKSFSLLKFCESIMMRFLFRQYLH

SEQ ID NO: 71405 - protein, 226 aa, Zea Mays
MHGRLRSLGQGRVHVGPITWRFCHTYDMNPSTIVGSACNSSCTHSRQQSPGSRSGTSKSPVRAPSSWYESISCLRVRSASARVAASALSTRLSRALSHSCYCSARSLARLPSARARLASACAACALARASLASLLSPASWRRRSVFSPSSAATLSASLRHLLSATDFSRTASACCVRSLSTSADTTAVRAPDAARSAKSVACKTHVRPRPQQSRQKNPKSSSTDLI

SEQ ID NO: 71406 - protein, 448 aa, Zea Mays
MEESGGSCGKREDAAPPWRPSDSTAFGRFAAAASPPEASPSASANGAAARVSSLHGVRRKPSVARLTAGIIQTYLQCDPEFKYSEVLNPKRFLTNPSTPAHNDGLDNANWDLILYVNLELVNKMSNRRFIVKEMLGQGTFGQVVKCWDTETNDYVAVKVIKNQPAFYHQAIMEVSLLRTLNQKFDPDDQHNIVRMLDYLSFQNHLCIAFEMLGQNLYELLKRNHLRGLKLKYVQAFSKQILDAMVVMREAGIIHCDLKPENILLAPSVTTAAEVKVIDFGSACLEGKTVYSYIQSRYYRSPEVLLGYPYTTAIDMWSFGCIVAELFLGLPLFPGASEYDVLQRMMKILGGQPPDELLREAKNTARFFKHVGSIYPGNEAPTGLCSAYKSLSEEDVEVRDSKKPQMGKWYFPHLKLDKLICTYPWNNSELTAIHVGIQTPCSTFGWMTL

SEQ ID NO: 71407 - protein, 58 aa, Zea Mays
MPPFSLSFRCHHSILVNYFIPVDFCVSFQLKNILDFINLPRTSFTGNWLAIHYNYFIS

SEQ ID NO: 71408 - protein, 585 aa, Zea Mays
MWSFGCIVAELFLGLPLFPGATEYDVLQRMVKILGGQPPDELLREAKNTVRFFKHVGSIYAGNAAPIGLSSAYRILSEEEVEARDSKRQKMGKWYFPHLKLDRLICTYPWNNSELAETEKTDRLGLVDFLKGLLEFDPNKRWSPLQALHHPFITGESFTGPYEPIPETARIPVARAAAIDHNPGGGHWLHSGLSPQVGSVNRYLPLNNVYPPKVPFSYGSSYGSFGSHGSYTGNAGFGNSYGSIGDANAINMYYSPLGSSGLTQIGPSPDVRLRMRLSHDRGIRLSPGSLGPMSVGASPSQFTPPNYHMQIPANSTGTHGSGSPASGVIHGSPLGKAAAVGPYNMRRNLPMPPHDYVSQHGQGRFRDGVSFSHSDACAQGHTGHSHNAAVPSSYHSGWRPKIGSRSGISLEASSSHVPSKAPSQSFDFSASSTLDPANWDPNYSDESLLQEDNSLSADLSSNLHFGDATGQDHIFATSNPVPTNQRGDQLFHVSSQGVSAHSSVLINYGGYNPQNYPQQNARPRHGQPILHQRYNQATSSPMRPMGSHHNGQPAWPSSFGMGDGVPWGGTRGHSFTTRKDYGSIF

SEQ ID NO: 71409 - protein, 566 aa, Zea Mays
MRSQLNASFSPPPSLRRALPSATPRALRFHAFPWRFRAPQHHGRGAGARCATNLPAPGSHGVGVLASERRADDGDTTVKNADAPSTSTATQGNLNMAAIVSIAFCFLHRIVSGRMQSMMNLFPWMSNGIASLPFACISDPTRKPMPLKLDLTLPPLPDFGWNFSRLYYRFNSQLDRNIALSIITLLITCFSFVIVGGLLFHKFRKQQQSLEDCFWEAWACLCSSSTHLRQKTRVERVIGFFLAIWGILFYSRLLSAMTEQFRNQMHKVREGAQVQVIEDDHIIICGVNSHLMSILNQLNKYHESSIRLGLATARKQKILLLSDLPRKQIDKLADSLAKDLNHIDVFTKSCSLSMSTSFERAAAHKAKSIIILPAQHERYEVDTDAFVSLLALQPCKQIAPVPIIVEASNATTCELLKSITGLNVQPVEMVASKLFVQCSRQKDLLKIYKHLLNQHKNVFNLFRRPELEGMKYMDAVVCGIFRSGKIHFHPSEEELLKETDKLLLIAPVRGMKRPQYRALSVRKETQTLSRNSEPREGQGSFNMATTMDNETRLNNIVKRPLKSLSK

SEQ ID NO: 71410 - protein, 289 aa, Zea Mays
MTSFLTKKNCQAQLIYWDSKVSEADMDAMWKHPDVYKEWIKSGERRGNVRFSHDAKNMPYLSRVEVKDMIAFSCCVYDGGDEEKEMDAAREIGWRGKFTKRGRVIRPGIIRMSGKCPLTPLEVGLMLRGMDFSNKTAIFLASGKIYKAEKNMASLLEMFPLLQTKETLASEEELAPFKMAAVDYSICAQSEVFVTTQGGNPAFFMGHRRYLYGGHSKTIKPDKRRLAVLFNNPRIGWTALKRHLLNMRAYSDVKGIEMKRPNESIYTFPCPDCMCRLNRTEHSKSKQSR

SEQ ID NO: 71411 - protein, 994 aa, Zea Mays
MDVDSRMATESDSDSDARGGSGSGSETPTASPSPSASPSPSAPGTPTAAVASPAPVAGPRPAPGYTVVDAAMDKKEDGPGSRCGHTLTAVPAAGEEGSPGYVGPRLILFGGATALEGNSATPPSSAGSAGIRLAGATADVHCYDVLSNKWTRLTPLGEPPSPRAAHVATAVGTMVVIQGGIGPTGLSAEDLHVLDLTQQRPRWHRVVVQGPGPGPRYGHVMALVGQRFLLTIGGNDGKRPLADVWALDTAAKPYEWRKLEPEGEGPPPCMYATASARSDGLLLLCGGRDANSVPLSSAYGLAKHRDGRWEWAIAPGVSPSPRYQHAAVFVNARLHVSGGALGGGRMVEDSSSVAVLDTAAGVWCDTKSVVTTPRTGRYSADAAGGDASVELTRRCRHAAAAVGDLIFVYGGLRGGVLLDDLLVAEDLAAAETTSAANHAAAAAAASSNVQREPGRYAYNDEQSGQTVTVSSPDGAVVLGTPVAPPVNGDMYTDISPENAIIQGQRLSKGVDYLVEASAAEAEAISATLAAVKARQVNGEMEHSPDREQSPDAAPSAKQNSSLIKPDPALMNNSTPPPGVRLHHRAVVVAAETGGALGGMVRQLSIDQFENEGRRVIYGTPENATAARKLLDRQMSINSVPKKVIASLLKPRGWKPPVRRQFFLDCNEIADLDNAERIFSSEPSVLQLKAPIKIFGDLHGQFGDLMRLFDEYGAPSTAGDIAYIDYLFLGDYVDRGQHSLETISLLLALKVEYPHNVHLIRGNHEAADINALFGFRIECIERMGERDGIWTWHRVNRLFNWLPLAALIEKKIICMHGGIGRSINHIEQIENLHRPITMEAGSVVLMDLLWSDPTENDSVEGLRPNARGPGLVTFGPDRVMEFCNNNDLQLIVRAHECVMDGFERFAQGHLITLFSATNYCGTANNAGAILVLGRDLVVVPKLIHPLPPAITSPETSPEHHIEDTWMQELNANRPPTPTRGRPQAPNNDRGSVAWI

SEQ ID NO: 71412 - protein, 166 aa, Zea Mays
MYRSEITHDMGEKWSGAHRIVPFLLSLRTTEHAFSSPRCNCTGRWFLRHFWNAGAASVGCPCMFAGGRPSGVAQQLCRRGVGHQRLIGHASYAGSPRWPRRASRASAAEARRGAAWPARHNVDGKGRAVRMLASRGSAAMADGSGEGVAHCAGTAVLKRERREDGC

SEQ ID NO: 71413 - protein, 839 aa, Zea Mays
MLRASTDSSRLSISSAPSSSSQGSGQDDIESLGDVYVWGEVWTDMIPAEGSANYLCSKADILIPKPLESDVVLDVQQIACGYRHIALTTRQGEVFAWGEELGGRLGHGTDADISRPKLVEALAVSNVEYVACGEFHTCAITASGDLYTWGDGYYNAGLLGHGAGTSHWLPKRVSGPLEGVQVLSVSCGSWHSALTTSSGKVFTFGDGTFGALGHGNRHTVAYPKEVETLSGFRTIKVACGLWHSAAIVETTNQAGVNVISRKLFTWGAGDKNPLGHGDKDARLVPTCVQSLIDYNFHQVACGHSMTIALSTSGHVFTMGSSSNGQLGNPKSDGKHPTPVQDRLAGELVEEISCGSCHVAVLTSRSEVYTWGMGANGRLGHGGVEDKKKPTLVEALKDRHVKSIACGSNFTTCICIHKWVSGADQSVCSGCRQPFGFTRKRHNCYNCGLVHCHACSSKKVLKAALAPTPGKPHRVCDSCFMKLKAAETSSNSSHSKRNAIARRSVDSKDRSERPEIRSSRLATGSTAEPLKQAELKAVRNEIKPDPMSTMRAPQVPSMLPFNNLAFGATFGGPASLKPMTMAPMPMAMPMSPAPLTKKPTPAAATPLCGKSDTDNLKMAKQVLNEDISKLQSQVNKLKQKCDAQEEQLQKAERRAEHSASTAAEESSRRNGVLEFIRFLDNELKSIADRVPSDAADGLKALQNHSERFLTEQGVRPLEATGMHRKCASIGNLVMSQDGSAGNASSSAASLASESPCHRIMENSSRANGDLAPKLGGTHGEVQLIEQFEPGVYVTLIQLRDGTKVFKRVRFSKRRFAEQQAEEWWRENQERVFRKYNHPAN

SEQ ID NO: 71414 - protein, 185 aa, Zea Mays
MRGSCVVHWVTQGLGDVWVITNCSPEQFVLPHTTPRHGRLSGEKKGGDSAAAEPQFKLFFTRISGPPPWELHGRWLLLRHHGSNREKTKERESGGLCVVTAAPHRRSGSGEADRDLAAEPTSSQRGEFLGGRRGKHRASGRRGLPHLHQYSGEVTSHLKIILIPGISSLRQVVPLITSFTHSCSD

SEQ ID NO: 71415 - protein, 151 aa, Zea Mays
MAARAQLPEEYPRRRDRLQEQGADGGGRIRSWAHVREGEHGWRALPQEGGHQDVLQLRGPLPGAREDVQLLHRCGLHKSSSKDRLTNGSKVDALKDQEYVLTYEDKDADWMLVGDLPWELPSELEELTIRAVLLPTDKEERRWPHSLTQGQ

SEQ ID NO: 71416 - protein, 395 aa, Zea Mays
MPEGVFERWLLRPTAQPAELGEGGETSTSKLAVPVASHLQNPLKTVCAIGDPASPLAPQPIFQSGPDAWISEIRDYLKENILPEDHVSVERIVRLAKRYAVVEGDLYRCGTNDILMRCITQEEGRELLTKIHGGECGSHSSSRMLVGKAFRHGFYWPTALQDATEMVKSCKACQFHAKQTHTPAQALQMIPPSWPFVVWGVDILGPFPRAVGGYRFLFIAINKFTKWPEATPVVNITQGAAVAFLKSIVCRFGLLSCIITDNRTQFTSRIFQEYCEDIGTQLCFASVAHPRSNVQVERANVEILRGLKTRTYDCLKKHGANWVSELPSVLWGNQTTPSRATGETPFFLVYGVKACLPPEILMGSPRVQLFDESMQEQLRREDMDFIDEHRWQAAI

SEQ ID NO: 71417 - protein, 398 aa, Zea Mays
MASRKLRHYFQAYNIIVPSLQPLKDIMRNREATGRIGKWAAEHNEFCIDYVHRSSIQSQALADFIADWTPGAQEEETNKDAEVWTVFCDGSWGTFGAGAAAVLVSPSKVKTCYATRLDFSCTNNIAENEALLLGLRKLKAMGIRRAILKTDSQVISGHIDKSYKARDPKLEKYLDTVRRIEASFEGFSVKNIPRGENEYADLLAKSAAQGLPLPSEVFFETIKAPSIELLERAVLNISPVYSEDWRTGIISFLQGNFLSDDEAYNRRIEARARPYVIIEGELYKRGVCSPLLKCLSKAEGIELMKEIHAGLCGSHIGSRPLLGKVFRQGFYWPKAASDAADLVQKCEGCQKCARDQKQPSSLTQLIQPTWSLQRWGLDLLGPLPPAQGNLRYVVVAVE

SEQ ID NO: 71418 - protein, 213 aa, Zea Mays
MMACRRLARDAVAASLRRSAATETTASTPAFFSSSSAAASSCSSGAPVAGSPIRHFLARYSSPAFQIQPSAAGLGPSFAARVALGLRPQLSGLNLIKGFGTSTMLAMTLHQGQVTAATKEQPSKAIAGPPQGSLKTKLGSFWPLVRKLQLPVGLIFLIMSGLHSPLSLTLNILLLLYCSSPSRYSIYLFLQEGGGSKPCCVEGGVHAYKKYYY

SEQ ID NO: 71419 - protein, 472 aa, Zea Mays
MAHPSAAAAAVSSTAPAANPSSGAREEGGARSPPSPSPSQRGRAKVVIVMGATGAGKSRLAVDLAAHFAGVEVVSADSMQLYRGLDVLTNKAPLHEQNGVPHHLLSVIDPSVEFTCRDFRDRAVPIIQEIVDRGGLPVVVGGTNFYIQALVSPFLLDDMAEEMQGCTLRDHIDDGIGLTDEDEGNGFERLKEIDPVAAQRIHPNDHRKIKRYLELYATTGALPSDLFQGEAAKKWGRPSNSRLDCCFLWVDADLQVLDSYVNKRVDCMMDGGLLDEVCSIYDADAVYTQGLRQAIGVREFDEFFRAYLPRKESGEGSCASLLGMHDDQLKSLLDEAVSQLKANTRRLVRRQRRRLHRLSKDFGWNLHRVDATEAFFCATDDSWQKKVVKPCVDVVRRFLSDNSTVLPSTSASDPSSRELWTQYVCEACGNRVLRGAHEWEQHRQGRGHRKRVQRLKQKSLRPWPSLLPQDRS

SEQ ID NO: 71420 - protein, 325 aa, Zea Mays
MGRKWNELSSAPWRMGEAAEDEDATRMSREGKVSITSNPEEMPTMSVPRSRRPDLDLTIDDFEEDEIDPELRYSFQRNNRFLKRVFSVDALVKPLPPVMAYSVSRNINFFFRIFTQFWVNNGLKPVFHVSRLSWVIMDFYLDLAEDNRKITPRDYLELALRPVQGGGRDISAKNVIRDSIRALFPDRECFTLVQPLNNEKDLQRLDQLPVRLKLFLSSFTQIAKYIMIAYSNVASVFLAYSALNVFAVGAGSARSKFEKLLHSSLKKAFEDYKRNAFLEADLQCSNKVQNMESKVRAACNSSNAKLDDIVRSMSQRPMVLENGKG

SEQ ID NO: 71421 - protein, 649 aa, Zea Mays
MPICEAFGSIPPPPNHKSTILGEISVYTVFSCAFLCLLRLWKFYRPPQEYCLAGRGGSVKLELTLDYLLLMHNNHIEFSNSSASNRDSCNDMGSVNEVPAQLIYIDSFPKLRAWYFQNQACIASPLSGLCNKNPVHQVANKILNMICRKMNKGVVSSSTLSSTSSSSVSGSSVSASDDPCQRPAVSGWEFLEAVPFVLEAVLTACAHGQLSSRDLTTSLRDLVDFLPASLAAIVSYFSAEITRGIWKPVPMNGIEWPSPGASLHSIEAEVKEILASAGVQINSCYPRGVPPMLPLPMAALVSLTITFKLDRSLEYIQGVIGQALENCAGGSSWPSMPIIGALWTQKVRRWHDFIVLSCMRSPFGRDKDAVAQLIQSCFSSFLQSSSSGSDIIANRGVGALLGDSITNQGLRLPMAPGFIYLRTCRTFHDTYFVSEVILKQVIEWAHKLANGWCFNGPPQLKSGRTPLSCAASMVQQVALLGGGLLCIAGGPLVVQVLYEETLPTLLLSARDQSLKGPGPVSSTLQGYAMANMLFYCGSLLWGADRTSPVMKLSFLSRRPRVVRTHMDFIAGVLDGHILLGCDPGTWKAYVSQFMFLVVKFVPSWLRDIKLDTLKKIAAGLRSWHEHDLALSLLERGGPQAISVVVETFL

SEQ ID NO: 71422 - protein, 378 aa, Zea Mays
MDLYVFATPYRITWDYYFAAREHTLEIKSWEEEAELKYVKEHGISIFLMPSGMLGTLLSLIDVLPLFSNTAWGQHSNLAFLEKHMGASFEKRTQPWVANIRKEDIQSGDFLALSKIRGRWGGFETLEKWVTGAFAGHTSVCLKDEKGDLWVAESGYENEKGEEIIAIVPWDEWWAMALKDESNPQIALLPLHPDVRARFNESAAWEYARSMVGNPYGYHNMIFSWIDTIGDNYPPPLDANLDFDLQGIIMEIERRGMSFDQLLTIPEQDEWVYSDGKSTTCVAFILAMYKEAGIFTPFSESIQVTEFTIRDAYMLKIFEDNPARLPGWCNAGTDKLPFCQILGEYRMELPEYNTIEPYAKMNENCPSLPPTYKRPARC

SEQ ID NO: 71423 - protein, 702 aa, Zea Mays
MDLDPEGIFRDDSDEDEDSVQEREANKEMVVYLVDASPKMFTPATTQDNEKQETHFHTIVNCITESLKTQIIGRSYDEVAICFFNTKEKKNLQDSAGVYVYNVGDREQLDRPTAKLIKDFSLIEDSFMSTIGSRYGITAGSRENTLYNALWVAQALLRKGSVKTVSKRILIFTNEDDPFGTITGAVKTDMIRTTLQRAKDAQDLGLSIELLPLSPPDDQFNMSLFYADLIGLDGDEMTEYLPSAGDKLEDMTNQLRKRIMKKRRIKTLSFAITNDVCIEVNTYALVRPTTTGTITWLDSLSNLPLKVERSFICNDTGALLQDAQTRFQMYNDTIVKFSVRELSEVKRVASHHLRLIGFKPLDCLKDYHNLRPSTFIYPSDERIFGSTCVFVALHSSMLRLGRFALAFYGNPTRPQLIALVAQEEVTSSGRQFEPPGMHMIYLPYSDDIRYPEEVHVTSDDAPRATDEQIKKASNIFKRIDLINFSACQFANPEIYLQSQGQLPGVANAIEEFKTSVYGENYDQEEAEAAAGKASRGNASKKRKEVTDAAAQISAAYDWAELADNGKLKEMTTVELRSYLTAHDLPVSGKKDVLISRILTHLGFMLRVLLHAAKWLWLQMSLETGEADEVMCWAILVIYRVTSWALGTRFRFQPARPQPALEAAQPRLRPQTARPHSASAGDLLSAQPRLRQCDRPPAPSTAR

SEQ ID NO: 71424 - protein, 150 aa, Zea Mays
MYGSRPAPMDSSSQPAAIDGSRGSGGGERNKREEEDDDEAAAEAGNGRQLVMPEDGYEWKKYGQKFIKNIQKMRSYFRCRHRLCGAKKKVEWHPRDPGGDLRIVYDGAHQHGPPPLAAPPGGHGQMQGGGASDSNRYELCTQYFGGARSR

SEQ ID NO: 71425 - protein, 82 aa, Zea Mays
MLCEMFLFHLAGTQISAKPPVFLMSWRRRIGKGHQSLFFDGCEKTGLQVQHLGDLVYLISNKQEADFVETKSDGGSSEGMIF

SEQ ID NO: 71426 - protein, 112 aa, Zea Mays
MLIQSSLMERVRAAQQQDCLLQEARLRVDVSKYVAACEVCQRVKAEHKRPAGLLKPLEIPEWKWEHITMDFVVGLPRSPRGRDAIWVVVDRLTKSAHFIPMKTTNSASELVP

SEQ ID NO: 71427 - protein, 67 aa, Zea Mays
MAISSPSKSFEPLDGESIATNLRMMVLLHLPTSQVEVQHCFLDDWAMVTNYILKDRLGFNFQRLWHE

SEQ ID NO: 71428 - protein, 63 aa, Zea Mays
MRQKADTEKLSKLFESDRVTLDASRTKYARLVFCTPYRSSWLQNQKFDILVIDEAASLNVTRC

SEQ ID NO: 71429 - protein, 570 aa, Zea Mays
MHEHTRAWAWEATVRKVQHPQPVGRRRVSPMSAADDYETASSSSSAAGDVCEHVHGYMERGLPNGDFYTGQWRDGAPHGAGKYLWTDGCMYEGEWRHGKATGRGKFSWPSGATYEGEFKDGFMDGSGTYTGAAGDTYRGSWSMNLKHGSGKKSYANGDEYDGEWRAGLQDGSGRYTWRNGTEYTGQWCAGLIHGRGALVWSNGNRYDGGWEDGCPRGQGTFRWADGSVYVGRWTRDTPTGIVQQKGVYYPSPAASSPTARDPRDVFARDLPGFMGARPDSPSPRKSRASSVRAANGRASSASGLSNSSGGDRKYEKICIWESDGDITCDIVDGPALGDEAGTARRSVRTDDGGDDRGLPPPSPAPHVTQWVPPREVKRQGETIAKGHKHYELMLKLQLGIRHAVGKQGPIVLDLKSSAFDPKEKVWTKFPPQGSKYTPPHNSCDFRWKDYCPQVFRTLRKLFKVDAGDYMLSLCGNEALRELSSPGKSGSFFYLTNDDRYMIKTMKKSEVKMLLKMLPAYYNHVRAFENTLVTKFFGLHCVKLAGANQKKVHHLGAQLISHIQRSISIQL

SEQ ID NO: 71430 - protein, 668 aa, Zea Mays
MEFAAMKRRDLLELCRQHGLAIRGSKADLAAVLAGALSGPPVAVAAAAESVVGVVVRKGCLKRLGGSASGGTSGASKKVSFALDETPEVKGRRRRSQVILPLVVAKTRGRRKGRKAPSSAAVSGSGRRRKHDGGGGSARGSVTREVGADAPVTRSRMKVASLHSHSGVESQNNPAKAEERGKVVGTATRRKQKRKAHENAGDIANSWAGISRRITRSLSSSAAAVSLPCDAEEERGARKVESSVAADVILATLVGKKRRKTWCRPKAREELPAAALGERGSSQKSDVGGGSVDHGAFQELCADAPVTQHGTKVVNLCAESGVESRNNPTEGEEKEEVVEAATYRKQKWKIQENSEDICARASSGISHRRTRKSSSSPAAVLLSPAAEKMEVADDKDEPGVKELAEVKVFATTAVPIIAESTSKRKEVDHVPAELKPAKVEFYGRTTRSHSTAAAALSPTVIGSKLRKAGDVHTNGEVSKDLEVPRNDAPITRSLRNRVVHINNSAVDGTRARKKLGTKRKPSSRPATHGRQPPVPPVEDKEQVAVPCKFSQHRRSSRNRPRPDELLRNTYLENNKVNGVPVGGKDLSIAHRLTHNAAKASVGDVESLSPGFEDSLTRSNKDDVRTKGMHQSVSNREFQNAKGGDVGKQPTGRGCVRRSTRISATSVRI

SEQ ID NO: 71431 - protein, 118 aa, Zea Mays
MNRFRPNILVDGCHPYSEDLWKTIKINNLTFLGVKLCNRCKVPTINQEDGVPGTEPTETLQTFRSDQVLRPSHKNKRQVYFGQNLVCKESLSGEGKVIKVGDPVYVVQAFASSNEAPA

SEQ ID NO: 71432 - protein, 190 aa, Zea Mays
MAHKGKATSDVTYNPDDGPEVYINPAVYSRLHDYTAIAQEVHDPEYDPRTEQIDPDVLMRVGGDKRHGRYWIADGAIDSSSTPTLSQVRARSTGSSPAIRPRYDSSQHRIQQLEAQLKKVRRERQEMETRMMAEREAEREARLADQQRMFQYMQSLGAAQGFAPPPPLFPTIDSALFHTPVSIKIVVRCW

SEQ ID NO: 71433 - protein, 73 aa, Zea Mays
MAGIALGHHGGWLEGAVGDLGHRQLLVVGLLSRDDWSIGGKHEVDPRVGHQVGLELIHIHVKSTIEPQGGSQG

SEQ ID NO: 71434 - protein, 130 aa, Zea Mays
MATICTSIMMSDPRARAPSPSFIGLITSFCLLVDDVRPFHIFKEFLLRYWSFVMGTSLIPADGEIWRVRRRVIAPALHQKYVTAMIGLLGEDSQRLCKKLNKATTDEEDMEMLLIERKRRVRACSLLPTG

SEQ ID NO: 71435 - protein, 192 aa, Zea Mays
MVNMRDNDSSSDAQLDEPLGRVSILSYGSGHMLNDITSSCWFTYLLVFLTDLGLSPGDAAIVMLSGQLADGFTTIFVGELMDRFGHFKLWHAGGSILVAISFSSVFGSCVPCKLMGINTSTLETVGYSTFAAIFNVGWAVTQVAHMSMVNCITSNPTSRVSLVANLSLYGVALVIFTLLQSVNVLVQYRWIA

SEQ ID NO: 71436 - protein, 61 aa, Zea Mays
MENTRKRQFLPGMNHMLVLMTTSRQYRQHLHKETDKIMAHHPLVVVNANEVKKVVHDLLVM

SEQ ID NO: 71437 - protein, 227 aa, Zea Mays
MVGAVTSGRLADFLGRKMTMRISATICIFGWLSIHLAKSAIMLYFGRTLLGFSTGVLSYVVPVFIAEIAPKNLRGGLATSNQLLICSGSSATYIIGALVAWRNLVLVGLVPCVLLLAGLFFIPESPRWLANVGREKEFHASLQKLRGEDADVSEEAIEIKEYIESLYSLPKARLRDLFLSKNIYAVIVGVGLMVFQQLGGINGVGFYASYIFSSADSNHIVWGHTHG

SEQ ID NO: 71438 - protein, 67 aa, Zea Mays
MTRFIRSNNGLQNTEQQKISKYINTHVTEAFPMRKAGKFGNENCKNIVKVSKSVDSATASSFAPSSL

SEQ ID NO: 71439 - protein, 874 aa, Zea Mays
MSRVMTVPGTLTELDGEDESEPAATSSVASDVPSSVAADRLIVVSNQLPIVARRRPDGRGWSFSWDDDSLLLQLRDGIPDEMEVLFVGSLRADVPAAEQDAVSQALLDRFRCAPVFLPDHLNDRFYHGFCKRQLWPLFHYMLPFSSPASASAAATSSSVATSSPGNGCFDRSAWEAYVLANKFFFEKVVEVINPEDDYVWVHDYHLLALPTFLRRRFNRLRIGFFLHSPFPSSEIYRTLPVRDEILKALLNCDLIGFHTFDYARHFLSCCSRMLGIEYQSKRGYIGLDYFGRTVGIKIMPVGVHMGQLESGLRLPDREWRLSELQQQFQGKTVLLGVDDMDIFKGINLKLLAFENMLRTHPKWQGRAVLVQIANPARGRGKDLEAIQAEIEQSCQRINVDFGQSGYSPVVFINRDVSSVEKVAYYTIAECVVVTAVRDGMNLTPYEYIVCRQGAPGSESVSEVSGPKKSMLVVSEFIGCSPSLSGAIRVNPWNIEATAEAMNEAISMPEQEKQLRHEKHYRYVSSHDVAYWSKSFILDLERACRDHFKRTCWGIGLGFGFRVVALDPHFRKLNMDSIVNAYEISESRAILLDYDGTLVPQTSINKEPSPEVLNIINTLCSDSRNIVFLVSGRDKDTLGKWFSSCPKLGIAAEHGYILRWSSKEEWQTCTQAMDFGWMQMAKPVMNLYTEATDGSYIERKESALVWHHQDADPGFGSSQAKELLDHLESVLANEPVSVKSGQFIVEVKPQGVSKGIVAERILASVKERGKQADFVLCIGDDRSDEDMFENIADIIKRNMVAPRTSLFACTVGQKPSKAKFYLDDTFEVVAMLSALADATGAELKSDSADELAASISSLDIGDEQSESSDTPIGGS

SEQ ID NO: 71440 - protein, 125 aa, Zea Mays
MDTSLGRRARPRLSSLFVVVLRRRPTLARRPRRSSPLEHLCPRPRHRLELGAPLSTSLDRLIHRRPELHSLSAPERKKQRGEGRRSGFLLASPWCLFNLCRIILSAQKCYIRSLQSSVLPLEVYG

SEQ ID NO: 71441 - protein, 949 aa, Zea Mays
MNPLPPPPGPRRVPTLLPVTAAVVSPVLFTNSEFHCAALLLPPSLSLRVRSLGSHAAAGCGGGGVRGLGFSVWRSLGVCEEEEEEEEEEEERMGTAGKGAWVVPAPAYREVEGWEGAGDDAPGFRCAHSLTAVAPTKGHGPRLILFGGATAIETGASSGLPGIRLAGVTNSVHSYDVETRRWTRLHPAGEPPSPRAAHAAAAVGTMVVFQGGIGPAGHSTDDLYVLDLTNDKFKWHRVVVQGAGPGPRYGHCMDLVAQRYLVTVSGNDGKRALSDAWALDTAQKPYRWQKLNPEGDRPSARMYATASTRSDGMLLLCGGRDASGMPLSDAYGLLMHTNGQWEWTLAPGVSPSPRYQHAAVFVGARLHVTGGVLRGGRAIEGEGAIAVLDTAAGVWLDRNGIVTSRTLKSSNEHDASSDLLRRCRHAAASVGSQIYIYGGLRGDILLDDFLVAENAPFQSEITSSMYNVDRVPRGETQNRNNNFHSDSPVHQSTNNSADKKSIDMLIEASTAEAEAVSAVWRAAKEASAASSEDSLSEGIGSESPLSETSPMPEDFDDGGSLEPDVKLHSRAVVVAKEAVGDLGCLVRQLSLDQFENESRRMHPSNNDQSYPGRRTLNRQRSPQVGELCYAAEQIFMQEPTVLQLKAPIKVFGDLHGQFGDLMRLFDEYGFPSTAGDITYIDYLFLGDYVDRGQHSLETIALLLALKIEYPENVHLIRGNHEAADINALFGFRLECIERMGESDGIWAWTRFNQLFNYLPLAAMIEKKIICMHGGIGRSINTVEQIEKLERPITMDVGSIVLMDLLWSDPTENDSVEGLRPNARGPGLVTFGPDRVTEFCKRNKLQLIIRAHECVMDGFERFAHGQLITLFSATNYCGTANNAGAILVVGRGLVIVPKLIHPLPPPVNSPESSPERGDATWMQELNIQRPPTPTRGRPQAAGDRNSLAYI

SEQ ID NO: 71442 - protein, 187 aa, Zea Mays
MEFGVLVVGSSHYDDAQGAGSIVLLPFEAPVADVEDWRRFESASPQGDLSLRTIKETLGSFGVAISIAWASMTRDFTPFGECIFAWSRARAEAQLSALEQLCVGAAHSEVKLCELAELRSRTERLESEAVQLRSSEGEGAKVEADHLREEETQLQGSLCEVSLRVREAESSLGEANVHLEREDAELS

SEQ ID NO: 71443 - protein, 156 aa, Zea Mays
MPTSEVWSLSDFEISKYIAEGRFGKVYLAREKQSGYVVALKVIFKAKLKKHRFHAHLRREIEIQQSLDHPNVLRLFTWFHDEERVVLVLEYAARGELYKVLRAAGRFTERTSATYVASLAGALAYCHKKQVIHRDIKPENLLIDIEMALKKLDMWG

SEQ ID NO: 71444 - protein, 738 aa, Zea Mays
MVNYQPISSTSENSTEDAGPTDSVEIWTKLSAMELNTSQNDAVLNCISKMHSKSSTFTLIWGPPGTGKTKTISVLLWLMREMKHGTLVCAPTNLAIKQVASRFLKLVQEHSGDTRCLGDVLLIGNKERMCVDGDLKQIYLYDRVRRLFGCFAPLTGWKHHLSSLSDFLENGYSQYLQHLQDSQEGDTPSFFSYARKRFAVIYMELRRCFNDLLLHVPKSSILEVNYNSILLLLEMLEEFNHMIQCRYFGDEIRKVFLYSNDEPDQTNSSVVTLGKMRIKCLEELSTLLSCLKLPLTSSKPTIRDFCIKSASIVFCTVSSSTKITANKKVEFLVVDEAAQLKECETLIPLRLWTLKHAVLIGDECQLPATVKSKVCTDALFGRSLFERLSSLGHEKHLLNMQYRMHPSISIFPNTSFYEGRISDATNVMEKEHRRMYLPGSMFGPYSFINIEDGREERDELGHSKRNFVEAAVIEEILYRLRRACFKTKRKVTVGVICPYNAQVVAIQGKIEKMRFDPLQVKTNSVDGFQGGEEDIIILSTVRSNSVGKVGFLSNAQRANVCLTRARHCLWILGNATTLASSGSIWSDLVRDAKDRRCFFNASSDYVISHVIAKQRRDLDRVNVEKSIHISSSKNCRVWVETRSPNDLNEQGTSSTSVSHYAGIPSSDIVVVSEFQRPSNKNEDVEDITVIPNKENDKDINAMPVIPDKGNVVDGNHILAIPCAMLSNLARWCIRSFRS

SEQ ID NO: 71445 - protein, 230 aa, Zea Mays
MPSTNMLNVHIQSLPCFEQEGMVWIWPRDDPPKATIPSLLPPSGFTCSLLMQGVHGLGGGWRLGSSMAASSSCSTTRHSSSLRASAPLQVLHIIGREDRVQIDDARRLHRRAVTPAAIDDASLWDTTTICSNVCTRYTITAGTNATGFTPIQFLSYAVTKRTVQTPIRISWLLTCRIFPDSKSSWSHLPRFKIAQFWRYVTNAMPCALEKIQNRHALYKTVSQILVHFAL

SEQ ID NO: 71446 - protein, 122 aa, Zea Mays
MAPAPWLLLGRSSLARRGARLPARTPGFLLPVPLPSPWCFPARACSPVQLGRPSLLAPPRCSSSLVLQTGKEAAEFLCAQPRSSVLAGPPPRPWRFPRPTYSLVGGRAAHSWCPVRVHLPCC

SEQ ID NO: 71447 - protein, 735 aa, Zea Mays
MKACEQSNPNSVDGHLFILSKVKICLLPLGFAAGTMRHWFDFGNKIICTILDLLKDSLKTLLDAVDDGNLDRYCIRITEYSKNIVLSGCPQVTTAFLYISVLPNDLSVSLKRRIVSSYTQVDHQTFVLYEELEKATKTLSFKNVHMVDISKCPNVHFGAAIDWLKLGFPELRVFRVSHCLSFQFDDLLYLLMRCPWIDEIDMTIDTSTVTPRHSVISSSSEVLSKAKPNQKRYGIHCSAYDRQPNSVFLNISRLTLEGRNDIDDMDLLEISVLKNSLCYINIRNCFLLTDDGISNLLMKCTKIHSMVLSYTSFGNRSIQMLCAANPSGHNSGHAHVMASYMQELHLDGCKGIDSVALSQLVSIISITKFLSLRETSLTDGALCKFVGSSLEYLDVSETVISMVSLAPVIQRNCKLNCLKTAGCCSLLLQCANVEHINGNKYGDFLQELGTTYCLEDVEMGWGFCPIRIEDLVPSFSKVRKMKIGLGTSLAENVLCALPMICPFLESLILRFQVISDRVVRRLLESATNLQVLCLHYCLGSLTSFSFQTKAPALRVLRLHWVTSWLTNDDLTILTENCNLAELSLSGCKLLDSSSQDIISSGWPNLALLHLEECGKVTVEGVSSFFNCKALEDVLLRHTGRGIGRSIIDDAIRELPLLRKLALDLCDACEDGYDSPNDAEGKMIRSVRMSRCKKMAGSCLEVPRQGSSTSRPVHKDTVVLEWSSRMFTTTIVKERV

SEQ ID NO: 71448 - protein, 86 aa, Zea Mays
MPHEARQSVVAVATLGIGGFSGDIGRVRRGLRGSVVCTTIWVSFVYQLLQSGGLDGVQRRYPAILCLCMRMLVEPILGVSSLIMMC

SEQ ID NO: 71449 - protein, 130 aa, Zea Mays
MGSEGRAWNGAGMAAGSGYGGGVEAKATTTAVSAAAPAEVPTSAASVDISLPLLKMSPRIIALCKELVEGWSSIDSSLFSIETVSGGITNLLLKVSVKEDNGNESSVTVRLYGPNTDLVIDRKRELQVRI

SEQ ID NO: 71450 - protein, 70 aa, Zea Mays
MLWIYGNHLLVNLFLCILPKRLHLILFGEDRVIATCPIDSDSTVSSEKANCTHGTLCVPLADIVSTDGHI

SEQ ID NO: 71451 - protein, 70 aa, Zea Mays
MVVVAPPPTIDAGHGSRCSATSCCILPLMGTLDLPVLPLPSLVSVEGASPVATTTVGQGKWRWRHWRGSQ

SEQ ID NO: 71452 - protein, 74 aa, Zea Mays
MVHLNIQQDSHYKMVTCSSCPKCSLPSFFYFTIFGEAMRFWRPLVLMFRCLMPKGKKLRPKQIDQLPLVNFSKI

SEQ ID NO: 71453 - protein, 1060 aa, Zea Mays
MPSVHVEYNIENITPHFCRLTDRTYSAPIKVHIEYTVGKQHEVRRKNNFIIGYMPIMLRSHACILYEKDEAELAKYGECPLDPGGYFVVKGTEKVILIQEQLAKNRIIVDTDSKGRVIASVTSSTHAIKSKTVIFMDKGKIYLQLNQFNKPIPIIVVMKAMGMESDQETVQMVGRDPRYGDLLFPSIQECASERIYTRQRALQYMDEKVTYPGATNQKEGRSYSILRDVFIAHVPVKNGNLRPKCIYTALMLRRMMDAIVNSDTFDDKDYVGNKRFELSGQLISLLFEDLFKTMNSQAVERMNKNSDKTHSSPLDFSQLIMQDSITFGLERAISTGNWDIKRFRMHRKGVSQVLSRLSYMASLGYMTRITPQFEKTRKTSGPRALQPSQWGMLCPCDTPEGEACGLTKNLALLSHVTTDQEEGPLIYLCYSLGVEDLLSLSSEEIHTPGSFLVMFNGLILGKHKDPQRLVIDLRNLRRSNVIGEFVSIFINEKQHCVHIASDGGRVCRPLIIADMGISRIDETHMEKLRHGTCGFDDFLRDGLIEYLDVNEENNALIALYEHMDQDDVERSSITHIEIEPLSILGVVSGLIPYPHHNQSPRNTYQCAMGKQAMGNIAYNQLFRADSLLYLLVYAQRPLLTTKTIELVGYDKLGAGQNATVAVMGYSGYDIEDAIVMNKSSLDRGFGRCIALKKYTVLKDNYGDGVSDMIVEPQRDNGVLIKQNMRALDEDGIAGPGQIIRNHDIYVNKRTPKNTSKGIGRALRESDYKDSPALYKGVDGETTVVDRVMLCSDTNDKLSIKCIIRHTRRPEVGDKFSSRHGQKGVCGTIVQQEDFPFSERGICPDLIMNPHGFPSRMTIGKMIELLGGKAGVSCGRFHYGSAFGEPSGNADKVADISSTLIKHGFSYNGKDFLYSGILGQPLEAYIFMGPIYYQKLKHMVLDKMHARASGPRVLLTRQPTEGRSRDGGLRLGEMERDCLIAYGASMLIFERLLLSSDPYQVQVCRKCGLLGYYNHKLKTSYCSMCKNGENMAKMRLPYACKLLFQELHAMNVVPRLKLTEV

SEQ ID NO: 71454 - protein, 162 aa, Zea Mays
MAASKPILYSAWISSCSFRVRIALNLKGVDYEYRAVTRNDLDYEKINPIKYVPALVDGDFVVSDSLAIILYLEDKYPQHPLLPQDLKKKAINLQIANIVCSSIQPLQCYAVIGLLDGTLGSNQSLQIVRNYTDKGFKGCDSKYATGDEVQLMCFLRPRCMQA

SEQ ID NO: 71455 - protein, 318 aa, Zea Mays
MASIEFGDKFSDVVGSPYYVAPEVLQKCYGPESDVWSAGVILYILLCGVPPFWAESEAGIFRQILRGKLDLESEPWPSISDSAKDLVRKMLIRDPTKRFTAHEVLCHPWIVDDAVAPDKPIDSAVLSRLKNFSAMNKLKKMALRVIAESLSEEEIGGLKELFKMIDTDNSGTITYDELKDGLKRVGSDLMEPEIQALMDAADIDNSGTIDYGEFLAATLHMNKLEREESLVSAFAFFDKDGSGFITIDELSQACEQFGLSDVHLEDMIKDVDQNNDGQIDYSEFAAMMRKGNAGGAGRRTMRNSLHVNLGELLKPTET

SEQ ID NO: 71456 - protein, 551 aa, Zea Mays
MVNSCAPAAFLHSSASWQALLVFFISVTAVGAADAGGQDAGGQGPCPHFSCGDLGNISKPFRRPGDPEECGVKAYELVCSNGKATIRINTGTYFVTSINYTNRSFWVVDANLDMHSSCPLPRWDQFPYTSEGLFWRSGKHTHIDLPTDDASLWACFVNCSRAVRITNNLGYKPVTCLSGSSSFVYIYVQYGACTVGSLEPFCGYLAEISFGTNPKGTNASYADIIQVVKKGFSVGFPKDEYDYSYHNTSWIFKTCLNNFTRYFHEQLSSGGIVGITRAFFWSDVFLLKCAESYNATTVILDFDVISVVTGVKITTLLALAVQMFLAHKYWKTTIAIDAVEKFLHMQQMLGPTRFAYTDITAITGHFRDKLGQGGYGSVYKGALLSGNMHVAVKMLGNSNCNGDEFISEVSTIGRIHHINVVRLVGFCAEEMRRALVYEYMPNGSLDKYIFSAERSFSWDMLNEIALGIARGINYLHLGCDMQILHFDIKPHNILLDSNFVPKVSDFGLAKLYPRDKSFVPASAMRGTIGRAKERRPKCSQLKPSILPSLGL

SEQ ID NO: 71457 - protein, 161 aa, Zea Mays
MMEEGAPDLRELVRLPDVLVVCSSTGWTDEKHMLYLRLLEETFVHQLHGSGCIFKGLFNCSPRYCRQMKSSKQIVKYTTPGQGCAIVEGGKVKSCIKAEHVESPSCCGNQQDEKVRSLEDNASTTKPMEKATSHARAASPGQASTCYVGKHRHSPSRSADF

SEQ ID NO: 71458 - protein, 325 aa, Zea Mays
MLVIDQYQSMRPCYKERFHPKCDVCSSFIPTDKNGLIEYRAHPFWMQKYCPSHENDGTPRCCSCERMEPKDSQYITLDDGRRLCLECLHTAIMETNECQPLYIDIQEFYEGMNMKVEQQVPLLLVERQALNEAMEAEKSVHHLPETRGLCLSEEQIVRTILKGPIGPGNRIIDMVTGPYKLIRRCEVTAILILYGLPRLLTGSILAHEMMHAYLRLKGYRTLSPEVEEGICQVLAHLWLESEITSGSGSMSTTSDASSSSSTSSSSKKGAKTEFEKRLGEFFKYQIETDSSVAYGDGFRAGMRAIERYGLRSTLDHIKMTGSFPC

SEQ ID NO: 71459 - protein, 77 aa, Zea Mays
MRVPLGSDTPPHPLPPRRHAHLKGPLPSACPGYPTRHRSRSHLTVVRTSGDRYCARALGIRRMRLRGRCHVCAPRIR

SEQ ID NO: 71460 - protein, 184 aa, Zea Mays
MVYSKDMATGEGAEDMTDAVQNLEEELVRVNANDEEDGEDMTSVETPRRSVDSTSSSSKKRKKEWKGKKTSSSDPLLDVFNEVSGDLKVATMSIGKMAQAMDREASNQEKARDEDPQQKLREKAINEVRRLEFTGSEVIKAAGVFVRMPDQMGMLFALPEPLRREYIVDMLRDEAARRERERSK

SEQ ID NO: 71461 - protein, 800 aa, Zea Mays
MSRRVAAALVVLCAATTVAVLAGDEDDITLPGCRSRCGNMSIPYPFGVEAGCYLPGFNVTCRRRNGDGPAAAADELLFLGDGTVQVLEISIPNATVLINSSAGYFDGDKYVSLSSPGTWSGALGSGDGDGVGVYSLAWGRNKLFAMGYNVQVRLEADNETSSVCVSLFFEGNFAAPTDDCAGFLCCQSPIWDQRTSYRFKALSLNGSAASLESDTYAWILDSELRFQYGAPQKDALTLPALLDWRINHTTCHANASSPACRSRHSFCHDGSLEVCRRNDSLCHNSTAGFGRAHICRCDEGYRGNPYLPNNGCKDVNECDHPDTYPCHGICTNTDGGYKCECVPGFAGNASVPTGCKDIDECAHPHLYPCYGVCLNKMGSFDCQCKRGTYGDPFTKGGCSYLTVWEMGLAIGGGTGFLLLALGAPIISRKIKLHKAKRKKERFFKQNHGLLLQQLVSQNSDISERMIITIGELEKATNNFHPSHEVGGGGHGVVYKGLLDLQVVAIKKSKIIVKREIDDFINEVAILSQINHRNIVKLLGCCLEAEVPLLVYEFISNGTLSHHLHVEGTISLSWDDRLRIALEISKALAYLHSSATTPILHRDIKSSNILLDDNLTAKVSDFGASKYIPIDRTGVTTDVQGTFGYLDPMYYYTSRLTDKSDVFSFGVLLIELLTRKKPYAYRSDDGDGLVSEFSSLLDQGTLVDIIDPQIMEEDKQVDEVAKLAAKCTKLSGEDRPTMREVEMALQNLRATEKHAHNNTTSTNKYEKGKTSQYMPFGGLAIETSRQYTMEEEMLLSARYPR

SEQ ID NO: 71462 - protein, 654 aa, Zea Mays
MAGKEQGGGGPPQRPPMPAASMQPPIKKLVRQLDFNSAALAGNPAMAAAAAAVSRALQPRALPAGFQHPQHVRAAVPMVVPQQLHQRALPVMRPHPVVGHVPRHAVPLAVPVPQLRPMPPQPVQRPPVAVPLKPDSPKPWARLYEGKDSTPTKKKCCNCRNSRCLKLYCECFASGTHCDGCNCTNCFNNPENEVARREAIEATLERNPDAFRPKIGSSPHTNRNNEVSSDLPLVGKHNKGCHCKKSGCLKKYCECFQANILCSENCKCMDCKNFEGSEERRNLFQGDHKNAINIQQATNAAVNGAIGTTGFPSPSTSRKRKHIDPSLDHSNKEHAAHRNCHIPQKNAVPDGSIPISQSAHPPTLGPFKVTYRPLLADIVQAEDVKELCKLLVVVSGEAAKTYADRKAKEERVGKKEDERAEQKEDDRAGSLALTNHDREGNNQDPDKKASIDDHSSRGTHTGKANQEESRPNCADDQKSNRPMSPGTLALMCDEQAFEKMCDEQDTVFTASQNAVPQQTVTVNQNQSALYAEQERIVLTEFRDCLRKLVTYGRMKATQMSKLGNGIGSSENGPRLPQITGSTVSGATLTLKPYDVQPAIGKEHTVVSENVEDNPRTIRRSFSFRAEDVHVVLGDHKKKGNHGSNILSFLKKTRR

SEQ ID NO: 71463 - protein, 677 aa, Zea Mays
MVRGSRPLGQTISKKFSDMRYSNISWPFLLLLCFVSMADAEYMKYKDPKQPINSRIRDLIGRMTLAEKIGQMTQIERQVASANVMKQYFIGSILSGGGSVPSPQASPAIWVNMVNEFQKGALSTRLGIPLIYGIDAVHGNNNVYNATLFPHNIGLGATRDPGLIKRIGEATALEVRATGIQYTFAPCIAVCRDPRWGRCYESYSEDHKVVQQMTDIILGLQGEIPVNHTKGVPYVAGKDKVAACAKHYVGDGGTHNGINENNTIIDEHGLLSIHMPPYYDSIIKGVATVMVSYSSLNGVKMHANHDLVTGYLKSKLHFRGFVISDWLGVDRITSPPGANYTYSVQAGINAGIDMVMVPYNYTDYINDLTSLVHKGVINISRIDDAVKRILRVKFTMGLFENPLADLSFAEQLGKKEHRELAREAVRKSLVLLKNGNSPDQQFLPLPKRARSILVAGSHASNLGYQCGGWSIQWMGDSGNITTVSCAGTTILDAIKSTVADSTSVVYSENPDDSFMKHNDFSFAIVVVGEPPYAETVGDSTDLTMLDPGPDTIRTVCAAVKCAVVIISGRPIVIEPYVPLVEALVAAWLPGTEGQGVADVLFGDYGFTGKLPHTWFKSVDQLPMNVGDLQYDPLYPFGFGLMINSSLPGFSGVDNLGYRKQRVLFAVLCSLLSLVLIS

SEQ ID NO: 71464 - protein, 255 aa, Zea Mays
MEGDEMLRVKLGRQGLEVSKLGFGCMGLTGVYNAPVPDQAGIDIIKHAFEAGITFFDTADAYGPHTNEVLLGKVQIATKCGIAGFDASGMRVKGTPDYVRACCEASLQRLATDYIDIYYQHRIDQSVPIEETMGELKKLVEEGKVRYVGLSEASADTIRRAHAVHPITAVQLEWSLWTRDIEEDIIPVCSLNIQDILGKTWRRIKFCIHDLKCCPRSMGAHLLNSLSPGFFIKEKMWSPSLEQQKPRTLTKISVL

SEQ ID NO: 71465 - protein, 295 aa, Zea Mays
MDNISLKTWDQEHVLTGGHGLMVNGYDPVIRALAQGLDIHLNHRVTKIIQRYNKVIVCVEDGASFVADAAIVTVPLGVLKANIIKFEPELPKEKLSAIADLGVGIENKIALKFDTVFWPDVEVIGRVAPTSNACGYFLNLNKATGNPVLVCMVAGRFAYEIEKLSDEESVNFVMSQLRNMLPQATDPVQYLVSRWGSDPNSLGSYSCDLVGKPADLYERFCAPVGSLFFAGEAACIDHSGSVHGAYSSGIAAAEDCRRRLSAQLGISAGLFQVGKAAMREEMTAEAMVPFQISRL

SEQ ID NO: 71466 - protein, 86 aa, Zea Mays
MVAPSIPLEPLRVRGSGSTLPSSRSARLCVARVAFRCSCACCREAPCSVRLHRVVVRAKLLPVDIKSVTLVLGMVKRCVCWCPNSS

SEQ ID NO: 71467 - protein, 85 aa, Zea Mays
MGHKTLAFTRLLLMKVFANTLRSHGLLVVYSHTRFRRQTKYEPCTCQDQKLSTTKFEFKWNLNFEFVNKNKENIKEKNKDKKGEN

SEQ ID NO: 71468 - protein, 83 aa, Zea Mays
MASSVTRTACLLVLTLFVVSAAVILPTSLCHGARGVGLRIGLDPNHPACIGACSVPGGSYTHLPPYRGGGPVKPLPPPNGGNP

SEQ ID NO: 71469 - protein, 71 aa, Zea Mays
MLSHTVRRRTTQRRGPKMCDTRHALSMSRDRATTTTAECGKGLENDDGPNRGRTKQRSSRRTNSARRPWTR

SEQ ID NO: 71470 - protein, 641 aa, Zea Mays
MAARAITRRRKYLFDHVKTPNLSSSSSTFQHGRIGSEDEPKITLLFLEQSSRDSRSEKEQYCVNLTNRNLAGIANRFLRRPAHGISLSYYGIGKNDFGLPLGARSMLQSVRASSTATAGQPKLDIDDEQSGDQKQNRKKKETSPEECDQAVEGLSTAKAKAKAKQVQESLKASQSAMQKFWARLLGIGPALRAVASMSRADWAAKLKHWKAEFVTTLQHYWLGTKLLWADVRISSRLLVKLAGGKSLSRRERQQLTRTTADIFRLVPFAVFIVVPFMEFLLPVFLKLFPNMLPSTFQDKMKEEEALKRKLKARMEYAKFLQDTAKEMAKEVQTSRSGDIKQTAEDLDEFLNKVRRGERVSNDEILSFAKLFNDELTLDNMSISRLVNMCKYMGIRPFGTDHYLRFMLRKKLQDIKNDDKMIQAEGVESLSEEELRQACRERGHLGLLSTEEMRQQLRDWLDLSLNHAVPSSLLILSRAFTVSGKVKPEEAVVATLSSLPDEVVDTVGTVLPSEDSVSERRRKLEFLEMQEELIKEEEKRKEKEEKAKQEEEEKAKLKETKGSAEDLALKEMIEATAREEELRKAKQHDREKLCNIGRALAVLASASSVSKERQEFLGLVNKENYTTQCLKRRVQKKLREHT

SEQ ID NO: 71471 - protein, 440 aa, Zea Mays
MGNMTRSNSPVSRRIVLSFLDFLNSVELAPGVDPEALEVAKDCLESIFSVNSTATGDAIQPGLLFELFASLEANERDQSDSQVEDTFELDHSGDELFAKFYAALDEINFFKTSPAGAEDPGLLSKATQYFDDALLKLGKKRASLVDIAESFKSRGNEFMRSNQHLKAVELYTCAIALNQQNAIYYCNRAAAYTLLNMNNKAIEDCLKSIEIDPHYSKAYSRLGSAYFAMGNYHDALYKGYLKAAELDPSNENVRQNIEVTKKKLAEQRVPPEEQNTHAGQAQGPHPIFTSGGVPFNLFPPGSSPVQEFFAGWSSDVGAPPPGHSISINLNDIFGQANVNASGQGSSQTGNSNNHTPSASFSTGAAVPPPFAFSGSGNEGTQARQASNGLEGEHGEPGIHRDDDVHINLAGPEQAAEALRAVMQMLGPQMGQHEGAPRGPG

SEQ ID NO: 71472 - protein, 859 aa, Zea Mays
MAQLLDERDLGVLTSVTSLFVSLVSNNVEAYWNCLPKCVRILERLARNQDIPQEYTYYGIPSPWLQVKTMRALQYFPTIEDPNARRALFEVLQRILMGTDVVKNVNKNNASHAVLFEALALVMHLDAEKEMMSQCVALLGKFIAVREPNIRYLGLENMTRMLLVTDVQDIIKRHQAQIITSLKDPDISIRRRALDLLYGMCDVTNAKEIVEELLQYLDTAEFAMREELSLKAAILAEKFAPQLLWYVDVILQLIDKAGDFVSDDIWYRVVQFVTNNEDLQSYAATKAREYLDKPALHETMVKVSAYLLGEYGHLLARRPGCSPKELFAIINDKLPTVSASTVAILLSTYAKILMHTQPPDVGLQQQILTIFKKYESYIDVEIQQRAVEYFELSRKGPALADVLAEMPKFPERESALLKKAEDAEIDTAEQSAIKLRSQQQTSSALVVADHPPANGFAPPVNNLTLVKMPSQTVSDTQESGVSYEEAPKPPVEAPKENGTPVEVQNRDTNITEINNEIKAEPPSTSHSTSPGDLLLADLLGPLAIEGPPAVEQNPAQGLNANQSPAGDLALATLDDQSNSVQPIVNVEEKFHILCTKDSGVLYEDPYIQIGLKAEWRAHHGRLVLFLGNKNTSALTSVRALILPPSHLKMELSSVPDTIPPRAQVQVPLEVANLLASRDVAVLDFSYAFGTSLVDAKLRLPVVLNKFLQTITLTPEEFFSQWKALTVHSLKVQEVVKGVKPMPLSEMANLFMSLHLAVAPGLDNNPNNLVACTTFFSEATRAMLCLIRVETDPQDRTQLRLTVASGDQYLTFELKEFIKEHLVDIPRTQVAPPRAAVQPQLPTTAPATYNDPGTMLAGLL

SEQ ID NO: 71473 - protein, 346 aa, Zea Mays
MDYLEAGANIIITASYQATIQGFESKGFSKEQSENLLTKSVEIALEAREMFLKEHLEKSTPIQHPVLVAASLGSYGAYLADGSEYSGDYGEAGTKEFLKDFHRRRLQVLAEAGPDLIAFETIPNKLEAEAYVELLEECNINIPAWFSFNSKDGVHIVSGDSLIECTTIADKCAKVGAVGINCTPPRFIHGLILSIRKVSLVSTTLCTVFTACLAPPSVMDDCSTYPCGVHIPWSPFLVYLGTNHCVGDGEGCCYVFTWITFVALPQVTDKPILIYPNSGERYDGEKKEWVESTGVSDGDFVSYVNEWCKDGAVLIGGCCRTTPNTIRAIHRTLNKSPNKQQLPAVE

SEQ ID NO: 71474 - protein, 192 aa, Zea Mays
MCSCACARLLPPLFSPAPSPNLRPAFPHSPTPARSRAVVALAGAASRDDAPAPLSSFDFLALKRELDEEEEAVVAVDAKEGAGAVNEDDGELGAEWSAGGTRRRRRRQMARRSALLAKQWAVALVEVKPSLLSGEAEKFLFEDIYQVGDVVLVANESVIDNEHKLVGLHSLVGYNVVTSRRRNVGKVSPCGL

SEQ ID NO: 71475 - protein, 587 aa, Zea Mays
MEAGSDFAPRGNDKEGHCGNNCEGCCTGAETFFPLRNYGINVCGEGGEYETLTLDCPLFRNARIILDDSEVILHSADSIASVGILHPRAFHLEQKPDSSDRIGDGSAVQESSSCVYEVDEVTTHDDVGEKQALSPAVDAYTNVDLCISKTGNNLRSMSCWIQDPSRASEGLKADLIAVLSRIENQLKEEGLGWVNVLYVHLYISSMKEFGLANEVYVSFITEKKCYLGVPSRSTIELPLVQAGLGKAYVEVLVSNEVVKRVLHVQSISCWAPSCIGPYSQATLYEDILYMAGQLGLDPPTMKLCLGGPRAELELALQNSEAVANAFSCSIYISAIHFLVYCSAQLTSSEKEEIEQTLKSSYITRLDRSKGGSYPTVLYVFASDLPKGARVEVKPILYVPSTDDWVAAEETETGVPLPAPSKTWTDCTAPYSALRDSCCQVHTTGGRICSAVVSITDDIASKICSAAGQLHHGEENLKIMARFCAFQIAKTLADNRFSWDSVTMLRLYYSVDLAVAADAVSGAFSEALAELAQDNPSMRTDVPFYNVVPVAGAGRSACANDIMACELLASNVSSAKSIPAEPFAVTPA

SEQ ID NO: 71476 - protein, 86 aa, Zea Mays
MFPFQFKRKQFPIRLSFAMTVNKAPGQTIPNVGVYLPEPVFSHGQLCVALSRATARSNIKILAIPAVDGKKRSRKGVRKNPTLDCG

SEQ ID NO: 71477 - protein, 317 aa, Zea Mays
MRANGREGLLTCCIRPSSIFGPGDKLMVPSLVAAARAGKSKYIIGDGNNYYDFTYVENVAYGHVCAEKTLSSEDGAKIAAGKTYFITNMEPIKFWEFMSLILEGLGYERPSVKIPVSVMMPVAHVVEWTYQKFAKYGMKVPQLTPSRIRLLSCNRTFSCSRAKEQLGYEPLVSLKDGVKRTVESYSHLQAQNHRSISKASIFLGNGNRMKLPSSLVPTHTLYIHSTFVLHLKSLPIYLFICSCKNSTLGRCEANCDSASTVGCYLLPLIYMWLHLHHSDGKAFVTNCSVLIHSWHAAIKSVQSFIIPFHLLYLPTIK

SEQ ID NO: 71478 - protein, 113 aa, Zea Mays
MLTQCVGLVPIGDQGSHVDEGDQGVNATQLLHNEPVLVTVSGDGSVGMWDVTLGQPCVRHIVAHTRRANAVVVALNDKYLCTGGSDQKVVLYHNRSGRTHLNWHLSHPLQGND

SEQ ID NO: 71479 - protein, 127 aa, Zea Mays
MATSSPGRRRTGTSCLPEGLRTELFSSPPSPEGFRPSLQCLFLSPSHGSRVRHSRAPLPPRWPGEIFPRPALPGQGRRGGVLERRREGGGSARREAGGGCGRRHAEAPRGPHAAAQEAWHPLQAFLK

SEQ ID NO: 71480 - protein, 53 aa, Zea Mays
MCRPCNGKSRDSYTSRLFERYSSGSLLKNYLYAKLATSSMSSSPPHPCQARRR

SEQ ID NO: 71481 - protein, 569 aa, Zea Mays
MTLAAPGLYAIHAGGMTEEKKIMRRKVLAKWLKESLLRLGPTFIKIGQQFSTRVDILPQEYVDQLSELQDQVPPFPSETAVKIVEEELGASVNEIFDRFDFEPIAAASLGQVHRARLNGQEVVIKVQRPGLKELFDIDLKNLRVIAEYLQKVDPKSDGAKRDWVAIYDECASVLYQEIDYMKEAFNAEKFAENFKKLDYVKVPEIYWAHTTPQVLTMEYVPGIKINRIKQLDKLGVDRKRLGRYAVESYLEQILSHGFFHADPHPGNIAVDDVNGGRLIFYDFGMMGSISQNIREGLLEVFYGVYEKDPDKVLQAMVQMGVLVPTGDMTAVRRTAQFFLNSFQERLAAQRKEREMATAELGFKKQLTKEEKFEKRKQRLAAIGEDLLAIAADQPFRFPATFTFVVRAFSVLDGIGKGLDPRFDITEIAKPYAKELLRFNDAGVEIVVKDAKKRWERQSRAFYNLFRQPDRVEKLAQIIERLEQGELKLRVRTLESERAFQRVAAVQKTIGYGVAAGSLMNLATMLYFNSIRGPATIAYSLCAFFGLQVLIGLVKVKKLDRQERLITGTA

SEQ ID NO: 71482 - protein, 811 aa, Zea Mays
MGSVDGRGVEGIHEANRRAQLIGWMNALLPEFSLPPDSSSEELRELLSDGVVLCRLVNTLIPGVLEGSWEGYAPSDQRLGNVKKFLSVVSDMGLPGFSLKDLDEGLMSSVVECLLVLRGSVDPRLGDDIPPDVTRTPLRKQWGVQEMDKPQVPAAALGKRSPAEDMRNGVADSKTHQKTSVFSGQKVREVFQLKRGSYSDLTAAKISEMMHSNSLDNAPTQSLISVVNGILDESIERKKGEIPHRVVYLLRKVVQEIEHRLCIQAEHIRSQNVTIKTREQKYCSKIKALEMLVNGTNEENQMAINRLQIVKNEKSQIEEKKELCEKDVQRLMKEKEYSKSIIMNLTKDMEAMNRLHEQQLEQIGRKAKEMEEQLTTRVKEVEYLLLQSNKKVEELEIASRLKSQLWDQKENIFQSYMDNQQLVIKDIRILSQSYENDMYALQMQWRNEISNLGSGLKCLVDAAENYHKVLTENQKLFNEVQELKGNIRVYCRVRPFLSGQDKKSTTIDYMGENGELLISNPFKQGKDGHRMFKFNKVFTPFASQAEVFSDIQPLIRSVLDGFNVCIFAYGQTGSGKTYTMSGPTTSKQDWGVNYRALNDLFDISLSRRNAFSYEVGVQMVEIYNEQVRDLLSNDIAQKTLGIWNTSQPNGLVVPDASLHSVKSTSDVLDLMEIGQANRAVGSTALNERSSRSHSILTVHVRGMDLKNGSTSRGCLHLIDLAGSERVEKSEVTGDRLKEAQYINKSLSALGDVIFALSQKSAHVPYRNSKLTQVLQSSLGCVFERHNFAQRYGNRADPGHQRQSKIPKFVVR

SEQ ID NO: 71483 - protein, 360 aa, Zea Mays
MEVTLEAICSFLDARTIELETNAYPALDELTSKFSAVFVVVSVNEVEALYRLFKKIGNTFIGNGLINKKFSVITTDVQDLYLVQQPQFLSIDKCRSWLSAFPVRCVIWVPQVLPEGALEQPVLSDEAMMSRLVGALITFKPLYSVLKLASREVIISSSLVLLGDGRDVDYLNPFHAYDKGNLSWLAAAEAKPATMSIAKRAIPEATSIEEANQIVRGNWLNVIEEHHLKYLGSSQVNDILDIGCSVGVSTRYLVEKFPSAQAVGLDLSPYFLAVEAQKEEKLSRPKPIRWVHANGEATGLSSDSFDLVSLAYVHVVFEEQFGSGRLLAYISARPGQCGRADGYILEGKELEFYMKKLQRK

SEQ ID NO: 71484 - protein, 443 aa, Zea Mays
MAPWVWVALQAAAVAASAAEALSLDVHHRYSATVREWAGHRAPPAGTAEYYAALAGHDLRRRSLAGGGEVAFADGNDTYRLNELGFLHYAVVALGTPNVTFLVALDTGSDLFWVPCDCINCAPLVSPNYRDLKFDTYSPQKSSTSRKVPCSSNLCDEQSACRSASSSCPYSIQYLSDNTSSTGVLVEDVLYLVTEYGRQPKIVTAPITFGCGRTQTGSFLGTAAPNGLLGLGMDTISVPSLLASQGVAAANSFSMCFAQDGHGRINFGDTGSSDQQETPLNMYKQNPYYNISITGATVGSKSIHTKFNAIVDSGTSFTALSDPMYTQITSSFNSQVQDKPSQLDSSLPFEFCYSISPKASTNPPNISFTAEGGSVFPVNDPIITITDSVSNPMAYCLAVMKSEGVNLIGENFMSGLKVVFDRERKVLGWKNFDLWATQEATFQ

SEQ ID NO: 71485 - protein, 104 aa, Zea Mays
MARSGAMVSCMLLLVVAQHRLKFCSPLLASQHLQICSLPWATDFVERSDGSQRRRGFLHAAPGGGGATAHGDGHADSGGGGGGGRPTRSWTPAAVAGDLPLQQL

SEQ ID NO: 71486 - protein, 511 aa, Zea Mays
MGVLVNVPTEWKNGRQVGESGNRLKEQLSRFCPQKVIPLWSYRGHTGNAIVEFAKDWTGFKNALAFENHFEAEGYGKRDWKLKYSGSEMFGWVARADDHRCQGPIGDYLRKNGDLKTVGDLETEGTRKTDKLVANLASQIEVKNKHVQELESKCNETTASLDRMMEQREQILQKYNEEIRKMQQIARRHSQMIIDDNKKLHKELESKMQELDLRSKELDDIALQRDCDRRNLQQEKEKNKIKTKHLMMATMEQQKADENVLKLVEEHKREKQAALGKILRLQQQLDAKQKLELEVQTLESKMKVMMHMPGDQDSESKKKMDELAEELKEKVDELEAMESLNQTLIIKERKSNDELQHARKELIDGFMELAVVGRANIGIKRMGELDLKAFGIACKKRLPKEDAEVISATLCSKWQEEIRNPSWYPFKVKVVDGKEMEILKEDDEMLQELKEEHGEEIYGLVTKALLEINEYNPSGRYPVPELWNYKEGRKATLKEAVQHVMRQWKSHKRKR

SEQ ID NO: 71487 - protein, 1131 aa, Zea Mays
MGHQGGLKEATSLEIEATTMSSDLDKAVGWDLPRLELKAMVLRWDNKGATCLVPKEAATIQGLGEATCRALKTSRMSWDLDKDDKGNLNEVSGLESILGLEEDVEWNLDEVPGLEHCSDLDEDVEWDLDEVPGLETSSDLDDDAEWNLDEVLGVESSSDLEGDEWNLNEVRGLESSSSLDEDVELNLTEVPGLEPSSDLDEDVESNLDKVPGLESEEIEDHYEPTRHVFVFSSIRRVATWSVQSVREEFIRIFVCVASFLRRISCSFWGRKASSLMSTIATPPPPIAQEKAASRNKRKYRAEPPSAELGPYGLEYPLTADCMGFEFMSPEKAAMAAAVAAAEGVSLDLLQNSCEKCKDLHPTAEELLDCQRYVNWSDPNETQLEEILLKSLGTTFDNAVSLITTMGYSEAVARAAVVRAAAQYNWRESLAGFGEAAVEVLKTEGDMLPREGASVEDMRRIEQAVLGSMVMWVNEAQPLCTTGDVMFCLLMSDMNVANASAMDYNTSSLPSVAAQVIAQPDAGNYVTGSGSNLSVSITNPQTGVTFRGKLTPMPPGSYGAVKADSSMAPASLNVSSTKPSVPGKTQCVIPNIEPKEQPVPIHDHSEDQPFVAAATQSVKNDKPSPSKRGGSKRDSLHRQKLTSFDKSSRALGSKGSLRSGKHSYSASAVLERKCRSFSDSTTSNLKGASRVAKGFAASISGSEVSADLSFTGTLSPSPSFDAKIVSNSNPAPTASTDLSLSLPSSSDSLTPSSNHDSITEGVDSSSKINFSYDEEQKVWIPQDKKDKIVLILVQRQKELQAHMHDWTDWAQQKVMQVAHRLAKEKDELQSLRKEKEEADRLQEERHHLEESTRKKLLEMESAISRANAQLEKAEASARRREVENAQLTLQMEAAKRHAAESATNISELLKKDENSRKRSQRWESDRALLQEELAAQKSRLFRVQEQLQHAKELKDQVQARWKQEEAAKTEAIALVTSVRKERGQIETSMRSEENLLHLKAANDAQRYKSEIRVLEQRIAQLKVSLDSSRVAAPKWGADNKSYALHLSEGRKNNNAQVLSNTAVPQGLDFDDIQRDRECVMCLSEEMSVVFLPCAHQVVCAKCSDLHEKQGMKECPSCRAPIQRRVRARPAGC

SEQ ID NO: 71488 - protein, 398 aa, Zea Mays
MKLVRHPNVVRLFEVMGSKARIFIVLEYVTGGELFEIIATNGRLKEDEARKYFQQLINAVDYCHSRGVYHRDLKLENLLLDAAGNLKVSDFGLSALTEQVKADGLLHTTCGTPNYVAPEVIEDGGYDGATADIWSCGVILFVLLAGYLPFEDDNIIALYKKISEAQFSCPSWFSAGAKNMITRILDPNPTTRITISQILEHPWFKKGYKPPVFDEKYQTSLDDVDAAFGDSEDRHVKEETEDQPTSMNAFELISLNQALNLENLFEAKEEYKRETRFTSQCPPKEIITKIEEAAKPLGFDVQKKKYKMRMENPKAGRKGNLNVATEVFQIAPSLHVVELKKAKGDTLEFQKKPVDPAEGCCVEVRRRGGRQQRGSMKVPFELSTGRRRFSFVHSFSFG

SEQ ID NO: 71489 - protein, 209 aa, Zea Mays
MAPEARGEAALVYRDALAPVEERVRDLLGRMTLREKAAQMAQIERTVATPRALTELGAGSVLNAGGSTPCEQASPADWAAMVDGFQRLAISSRLGVPILYGTDAIHGHNNVYGATVFPHNVGLGACRDGELARRIGEATALEVRATGIHWTFAPCVAVCRDPRWGRCYESYSEDPEIVRSLTTIVSGLQGQPPADHPHGRMYLLVLNIS

SEQ ID NO: 71490 - protein, 551 aa, Zea Mays
MDGPASPSAAAETDTRGGEAPSKAKRGNAEEKYQHGQPVYFPEELMDNWVSFSLRGLYYCYNISLQGSCNTTADPTDIILAVKCDMGPDFFRYSFNLGGTDITIKYLYKIHLNQEQVLFARRFQITVLSLLINSNSSEVSNAIKYFREWQVDLGVVYLLLPTASGKIDWCGIKFSTSSAYDVTDKNMRHCHSCKDADILQTMDDPCCRCILQNSVVYAPRERKFYIITGLDLNANQPLDLNNRSAVSCKSKPLLVASGLFTVQNFLYKCYGKRKEPTSVKLPPELCKIVMAPVSANTLFSFSFVPSIMYRIQCLLLSAKLKIQLGPRMQQFNITAMKILEALTTKECQEKFSMESLETLGDSFIKYVTGQNLFNKYKHREDMLTSMREEKVSNPALCQLACKSEIVGYIRGELFNPQKWTIPGFGYDSRGNNKVFFRATNNMYSLKKISIKSKRIADTVEALTGAYLSTCGELAAVHFIKALGMDVELHSKMQVERTITTKSEELIDAESLQTMLKYVFYDTSLLVEALTHSSYNITGITACNEMAFYGST

SEQ ID NO: 71491 - protein, 256 aa, Zea Mays
MLGHDLATDPSSTLRMVTSRVSSAPLGLVCSLSFDRGFKEKNNIFINVDRCMKYSTFCYAPRNPNITPLATASFGDMADSSIFTFPRIHVKDPYQRLGISREASEEEIRAARIYLISKYGGHSQALMQLSVPMIGLSCRVSLIGKKPKTNLKKKIRELSQSRAVKAIQGRFQTPRSKVIWQTAITFVLLGVLTLAFPTEEGPTLQVAISCAANIYFIYQRVKSGWRAFFYGLYKQIRGGSYFLVAYVCTIKGPLRS

SEQ ID NO: 71492 - protein, 147 aa, Zea Mays
MLHEKLSPLLGSEVAVLCKQLADLEASHATENAASTDKFSKLEDTKIRYEPDLRRVKTTLDGDREANNASLRQKFDMEKKNHEDEMHKREEKIQSLLSEVTQQKEHIQTLSSTKSTLKILRSLSEDQSKKYMAVKSLRTTVRCSNFL

SEQ ID NO: 71493 - protein, 344 aa, Zea Mays
MVVVDRFTKYGHFLPLRHPFTAQGVAQIFLDQVVKLHGPPKSIVSDRDKIFISSFWKHLFQLMDVKLLFSTAYHPQTDGQSERVNQCLETYLRCAVNAQPAKWKLWLALAEFWYNTTYHTSLGCTPFKALYGYDAPMLALPQSGVPEEGSVTDWLADRVAFSTHLKEQLARAQNRMKQMADRGRTAREFQVGEMVLLKLQPYAQKTVVNRPCPKLAFKFFGPFRVLAKIGAAAYKLDLPADAQVHPVFHVSQLKPYYPSYTPVFTSLPPLVDLSRTGIVPEEILDRRLVRKGHQAVPQVLIRWSGVPVESATWEDYYVLKNRFPDAIAWGQADSEARGIVMSEQ

SEQ ID NO: 71494 - protein, 789 aa, Zea Mays
MLSTLDVSYFSFCPSYKCTSYLSDGICFRLGAGFLNGLLEAGASATESSGFSNCQLGNDVSSEESTTIDILQKMFLPSSGPWHANNELAGNYQKQRDSSAWNRAEQKRLKEELTSVVAKLEESKQKLAVLKAQGDNKQATPILVPMLGKKTAEKVGDKQTELQDLEATHKELMESISKRLEEIRRLHTERIGILNNLATFQNILTDFKSIHSSKAFQLVNDQLQKSQAELDGHQTLLEKLQVDMDTFVWRERQFNQKVDLAEISQKVSAYYVSRIADLEKDVQKLCNEKNMLVLKLEGALREPGRNQVISEFKALVSSLPREMGAVQTELSKHKDASLQLHSLRAEVHSLSSIRTRKEQEIEETSRSAHAGSDISQLQSLVHELRENTQELKLFVELYKHDSADSRQLMESRDRELAELAGVHVLRYSLNESKLEQRVIAANEAEAISQQRLATAEAEVAELGQKLETSRRNLVKQSDILKSKHEECEAYMVEIESIGHAYEDIMSQNQQLLQQIIERDDHNTKVWRHGVEIFSGLLKLFMEGVKAKQSHDALHLEVCSLQRNLQHASTLMDLCNQKLIHLEDKLRGWSERLRRLSEDGMQQSISLGISQTKLTGMHGEAPKLGQALNVLQAKVGSNRLEVAELLIELETERFSKKRLDDDLDLMSSKASSLREKADNSQVLQKLLHEAKEYRGILKCGICHDRQKEVVIAKCYHLFCNQCIQKSLGSRQKRRLAPVSHTPELPGALLIPGICAASQRLRYQKVLRSTEKHSQFSSRSQLPETFSNKQR

SEQ ID NO: 71495 - protein, 73 aa, Zea Mays
MMSTVSEDAILVGSSFRYQSSLGNNNKRVGLFDMGDGSSEPAAEDNNQMHQVLLHATIQWQMFNVLSTRALVR

SEQ ID NO: 71496 - protein, 584 aa, Zea Mays
MMHGLLDIFEQLKLVKSGQRQGINFVGAIFPTIKAVQAAVTLGTGCSLGPEGPSVDIGKSCANACSEMMESNRERRIALVAAGAAAGIASGFNAAVAGCFFAIETVLRPLKAENSPPFTTAMIILASVISSTVSNVLLGARPAFIVPAYELKSAAELPLYLILGMLCGAVSVVFDRLVGWFSRFFGHIKEKFDFPIIVYPALGGLGAGIIALKYPGILYWGFTNVEEILHTGKSASAPGIWLLTQLAAAKVVATALCKGSGLVGGLYAPSLMIGAAVGAVFGGSAAYLINSALPGNAAVAQPQAYALVGMAATLASVCSVPLTSVLLLFELTKDYRILLPLMGAVGLAIWVPSVVNQPNDSEPSGFRTSRRGYSSMSPEERNGSLRQGDVVDDLELSIIQTDMSNYGTYNAEMLLDDLKVFQAMSKIYLKVLPSATVTEVLNLLHDRQQNCALVVDPEDFLEGIITLGDIRRMGYGLHVESFINGDHPKADDNSSSISLCLTRGFQYRGSERGLLTCFPDTDLTTAKSLMEARGIKQLPVVKRGVAHRTAGKRRPIALLHYDSIGCCVREEIENWKTIYQRLAC

SEQ ID NO: 71497 - protein, 568 aa, Zea Mays
MASGGEGAGSGESPPAASVEAAAGEATLHIRCANGSKFTVQTDLGATVGGFKEVVAGSCDVPAPQQRLIYKGRILKDEQTLESYGVETDHTIHLVRGVAPPAASSAPAAASSLASSTLSSVPAGGLGDLFPGVGAPGSGRSSGIFGPGFPELEQVEQHLSQNPNLMREIMNMPAMQNLMNNPDLIRNMIMSNPQMREIMDRNPDLAHVLNDPSVLRQTLEAARNPEIMREMMRNTDRAMSNIESSPEGFNMLRRMYETVQEPFLNATTMSGEGNTASNPFAALLGNQGSNQPGQGQPATYTPTIGSESTTGTPAPNTNPLPNPWSTNAGSAQGATRSSGNTRTGASGHVGGTGATGGLGGLGSPDLSSLLGGLAGSPRTGASGGLGGLGSPDLGNMLGGSPDVSLFSQMLQNPAMMQMMQSIMSDPQTMNQLLSFNPNARNLMESNPQMREIFQNPEFLRQLTSPETLQQLLLFQQSLLGQLGQHQPNQGRNNSGSATGTPGNPSLDTLMSMLSGLGSGVPPEELYATQLTQLQEMGFIDTAENIQALLATAGNVHAAVERLLGNLGQ

SEQ ID NO: 71498 - protein, 85 aa, Zea Mays
MLGAEVAVSHRTPSPTNLGSGHALFISLGHNLFGSLLVTILTGRVSLYIVTLAQSIGVARDFLLVTSGNGVVTKTDGAATKPRAS

SEQ ID NO: 71499 - protein, 136 aa, Zea Mays
MAELALAPSPCFFLPRAAPWCSDPAPRASCSHGQRCSSPCVARLSRPPAPRPTPASLAPLSPCRALASSDFASRCSLTHVLVGVVEFLFDQLVIASFAVECQTRHPLLELYLTSSLPTSAESRCRFARQQEIPKIG

SEQ ID NO: 71500 - protein, 637 aa, Zea Mays
MPRKASSNSDARAKSRKRKRAAASASPSKQPDDHSDDSDTAAAANGDDETSRAASVNGGGGTLAGVGGDDDPVLDLRAAEVLSSSAEPVSAFPAAVRRAVSRPHPSVLAVIAAERAAASSDDAPVTPASVPVLENISHGQLQVISAMLPDHPSLSYDPDKPSTYVCTPPPLMEGCGVHKQFYDKLHIVPRHSDWFVPQTVHRLERQVVPQYFSGKSQGQTPEKYIMLRNKVIAKYLERPGKRLVFAECQGLVTSTPELYDLSRIVRFLESWGIINYLATGSVYRGPRTASSLIKEETTGELQLVSAPMKSIDGLILFDRPKCSIQANDISSLVSTSSAPFVVNHDGDSANLDEKIWERLSESSCSFCSQPLPSMHYESQKETDIALCSDCFHNAKFVTGHSSLDFQRVDAMKDGSDTDGDRWTDQETLLLLEGIEKFNDNWNHIAGHVGTKSKAQCIHHFIRLPVADGLLENIEVPEASLPSGMQSSGFLHSDSNGSTSGSQPGNQIPFINSANPVMSLVAFLAAEVGPRVAASCASAALSVLTREDSRMNAEGIDAMGHGTHLNYGPSSSISSETVKNAASCGLSAAATKSKLFADQEEREIQRLSATIINHQLVTHFYGHAVKETGVETEAVCGG

SEQ ID NO: 71501 - protein, 64 aa, Zea Mays
MTLPPRTWAVAQQFLAEVEEPPQFRPPPWSVLLLVWRTVRTSPCNSHWCTHSVSAFDYGIRASA

SEQ ID NO: 71502 - protein, 362 aa, Zea Mays
MMPDPSETGQIVGGEAMAAYLTTFERKRARTLATEPGSRLTMYLAQRLETARRRARPPLRRGHHRQTAAVTTSWRWLPLSLGAAAAARSAHVLGRAGVRRSRMVAGFRRTILFPMPRSPLPPTRGAGPSGANKYGAYRARLASLPCRFHLLVLQLDDDVADLRELVGRLASKASAEAMAEAYEDYSSERAELLFKTCQVVLKFYPCGPHGPAFDGGFSGFQLPIASLFLFVAHWLSRSHTEAAGGVVRHRSVNAGPTQTQEKGHQKHLNKIVSSLGVSLKSEPHSTKPMVVSEQTNKHGSHGRAHPALKILERGRNISSSSSFPSYSSRWRSAGIEEEEGKRRGRKSSGNPRTVRMTVVERR

SEQ ID NO: 71503 - protein, 79 aa, Zea Mays
MDNLSAISLSKNPVFHKRSKHIKLKYHFIREFIDRGEIELEVVGTSDQLADILTKALAKVRFQDLRGRIGVIKLHSTLN

SEQ ID NO: 71504 - protein, 201 aa, Zea Mays
MRGGASAQKRSQATSSVAPRAVPDPVQACVVGRRRPAVRVRQPRFPQEPAVGQEGGDVPEPHVPRLHLCRHRPVRDAIAFQEAEAALQDTVPYRGPADAAQVPGQSRHRARWDPSSGCTGRPCPRDSPPSVKAQASPAKTRCCSFSPSRLATRLMSPIKARLSLGRSRDSGVGVGGGPMSGLKQRPGVSLTVRVLSKISSR

SEQ ID NO: 71505 - protein, 322 aa, Zea Mays
MAIVLLALLLFPSAYAQPWSVCGNTGNYTAASTYQDNLSQLAASLPKKASSNTSPLFATGTAGAVPDLVYALALCRGDINASACKDCVTIGFEDAQQLCAFNKEATVYYDSCLVSFSNEDFLSTTVNGNENEVTVLMDAQNFTESADYIRLLLFTLLNDTSESAINSIRRFTTARMDISSLPTIYCAVQCTPDLTADECAACLQDFPQVTLQYLDGQRGGRLLGVRCNMRYEIYKFYQGDPMLRIISLASAVPTIGKTPPGTPVTVYPQPPPAAPPAPQMITTPIAAQEETGTDGGYLCAWCESNELGCWQVLRCIIITQKG

SEQ ID NO: 71506 - protein, 570 aa, Zea Mays
MGRGGARAAPAAAVPPWHALPDEVWEHAFSFLPADSDRGAAACACHAWLRFERRSRRRLAVANCYAASPRDAVERFPAVRAVEVKGKPHFADFGLVPPAWGADAAPWVAAAAAGWPLLEEISFKRMVVTDDCLEMIAASFRNFQVLRLVSCEGFSTAGLAAIAAACRNLRELDLQENEIEDCSIHWLSLFPVSFTSLVTLNFSCLEGDVNITVLEQLVTRCSNLKTLKLNNAIPLDKLANLLRKAPQIVELGTGRFSADYHPDLFSKLEAAFAGCKSLRRLSGAWDAVPEYLPAFYCVCEGLTSLNLSYATVMDLIEDHGLAVVASSCNKLQELRVFPSAPFEAAEQVSLTERGLVDVSASCPMLESVLYFCRRMTNEALITIAKNRPNFTCFRLCIIEPHTPDYITHQPLDAGFSAIVESCKGLRRLSVSGLLTDSVFKSIGAHADRLEMLSIAFAGNSDLGLHYILSGCKSLKKLEIRDCPFGDKPLLANAAKLETMRSLWMSTCSMTLGACRQLARKMPRLSVEVMNDPRRGFPLDSLTDESPVETLYVYRTISGPRSDTPACVQIL

SEQ ID NO: 71507 - protein, 77 aa, Zea Mays
MIHLSASGMNRIATKMCIIQNLLADLIIFGHNYAVVKPYNTLIVSSEAVGFTGFYFLMNVLHSLIISLCVNYLLQDD

SEQ ID NO: 71508 - protein, 797 aa, Zea Mays
MAFPADALVLEITDTSSSATAAAARAPSSPSPPPLSISDLARFDPLPSPTVAVRVDRHRLIESSSYFRALLGGSFSESGREHVRVGCNLEAAVQVLRYLFEPSESFNITHNNFLPLLEGALFLAVESLLVECQRWFGTIASQTSAMSVPLDFIIEVWYFAEEHGVTFVQDICQKFLAQNFAHAISGRSFNKIPYDLLCSAIKCPHLTVDSEKQLCEAILYWVSENMKACEQSNPNSVDGHLFILSKQVKICLLPLGFAAGTMRHWFDFGNKIICTILDLLKDSLKTLLDAVDDGNLDRYCIRITEYSKNIVLSGCPQVTTAFLYISVLPNDLSVSLKRRIVSSYTQVDHQTFVLYEELEKATKTLSFKNVHMVDISKCPNVHFGAAIDWLKLGFPELRVFRVSHCLSFQFDDLLYLLMRCPWIDEIDMTIDTSTVTPRHSVISSSSEVLSKAKPNQKRYGIHCSAYDRQPNSVFLNISRLTLEGRNDIDDMDLLEISVLKNSLCYINIRNCFLLTDDGISNLLMKCTKIHSMVLSYTSFGNRSIQMLCAANPSGHNSGHAHVMASYMQELHLDGCKGIDSVALSQLVSIISITKFLSLRETSLTDGALCKFVGSSLEYLDVSETVISMVSLAPVIQRNCKLNCLKTAGCCSLLLQCANVEHINGNKYGDFLQELGTTYCLEDVEMGWGFCPIRIEDLVPSFSKVRKMKIGLGTSLAENVLCALPMICPFLESLILRFQVISDRVVRRLLESATNLQRIAIWLNFHFLVANFLTPALKTLSHLGGQTWHFYTLRNVVK

SEQ ID NO: 71509 - protein, 122 aa, Zea Mays
MTELREMDKDGSSERSRPDHGDVKMLKFRPKVPRQKQKPKQQDPKPIDEDVMKILRTRQVAAKSAPNTEDECSPQKTLSTPPSADVVCLSPAQLGVQKQNQLPLQIPRSFPVPVNSGECEDS

SEQ ID NO: 71510 - protein, 203 aa, Zea Mays
MMTVDLGLQAAPPPSSSGGVPSSCTALPPGFRFHPTDEELIVHYLRKRAAAAPCPAPVIAEVDIYKFDPWDLPAKAVFGEAEWYFFSPRDRKYPNGVRPNRAAGSGYWKATGTDKPITLSSSSSSSAAAAAGMIGVKKALVFYRGRPPKGVKTSWIMHEYRLAEALHAVVNAYRPTRFKNNASSSMRVRAHATAPPQSSSLPS

SEQ ID NO: 71511 - protein, 431 aa, Zea Mays
MGAMGIVVRACAPPAPAAAAAPAPSGSRDAGQAQRRSKPSRTGRVRVLGGTGRVGGSTATALSKLCPKLGILVGGRNREKGESIAAKLGGQPEFVQVDTRNAGMLEEALQVVAVRGVAKPEAAATPARRSRPIPLASVAVWSLVATGAANAAELWDPLALHGSSGLVLADLGIGDWFGGLLFSAGQQANEAVQDQLSALSFSSLAVIFGAGLVTSLSPCTLSVLPLTLGYIGAFGSGKGRSEVVGNSIAFSLGLATTLAILGVAASFAGKAYGQVGQGLPVAASGLAIIMGLNLLEVLELQLPSFFSDFDPRAAAANLPSGVQAYLAGLTFALAASPCSTPVLATLLGYVATSRDPIIGGSLLLTYTTGYVAPLLIAASFAGALQWCIFTWWRCLYPTGQGVSSNINGHVDHGWTRIARHQSVWRANDIWM

SEQ ID NO: 71512 - protein, 195 aa, Zea Mays
MAGNRTVREPRVVVQTMSDIDILDDGYRWRKYGQKVVKGNPNPRSYYKCTTVGCPVRKHVERASHDLRAVITTYEGKHNHDVPAARGSAALYRPAPPPADTAGHHYLAAARPGVAYQTGQQYGFGDQLGSFGLSGAPAQSGGGGFAFSSGFDNPMGSYMSQHQQQQRQNDAMHASRAKEEPREDMFFPTSLLYTD

SEQ ID NO: 71513 - protein, 341 aa, Zea Mays
MWLRGVTGEGGFHSLNFQSPGIGSWGQQRLHPSLLSNDHDQYQAVVAAAAASQSGGYLKQQFLHLQQPMQSPQEQCNLNPLLQQQILQQASQQQMVSSDAQNIQSVLNPGAIQQQLHQLQQMQHTHNDQKQKIQPDQQYQVASSAVLPSPTSLPSHLREKFGFSDPNVNSSSFISSSSNENMLESNFLQVSSKSVDLSRFNQPVVSEQQQPQQQQAWKQKFMGSQSMSFGGSVSLNSPTSKDGSVDNKVGRDVQNQSLFSPQVDSSSLLYNMVPNLTSNVADNNISAFPSGSTYLQSPMYGCLDDSSGLLQNTGENDPTTRTFVKVSIIESTKNKFKPFLM

SEQ ID NO: 71514 - protein, 400 aa, Zea Mays
MLNGSNKDVDSCSEDILLKVEEILLSCKEIKPADRDYKRTTRPELCSKWLALLTMEKACLSAVALEDTSDMVLELGGNFKETLRQLGGLDDIFNVMVNCHSELEKLVKDASTTVVEGKEGAPLQSTTLLLKCLKILENATFLSDNNKTHLLSMSRKLSPKCRSLSFVGVILNIVELLSADSRGLSLLNHHCKCNNSKKKSILLNRRCQYCSSTKSEASHVTLSSSSDVSQSERILNCSSFSSNGTSSGSFGVKHINGASLKLNVRMDRSKAYPVRGSTGWISMKAQTSDWNSREMAKKRRLSENVRTDLSNGGDDPFAFDDIDQEPSNWDLFGPKRKSPQKRAKRTNGEVLDDCGTALMGSPKLCQPEDIYQSVATSGSKVVDESNLLEDCLLASVKDYA

SEQ ID NO: 71515 - protein, 56 aa, Zea Mays
MDMDSGSWLHGYATTNASGNNGFMCGYAAGSSCSPAEQQQCMEDEQQQFLVSSQIQ

SEQ ID NO: 71516 - protein, 187 aa, Zea Mays
MDIQSFLSFENSGPPGDLFVCLDIEEPSDIKRDGINLYSTVSISYLEAILGTIKKVRTVDGTNDLRIPPGTQPGDVIALAKQGVPSLNKPTIRGDHLFTVKVAIPKRISGRERELLEELASLSNGGFVRTDAKPKPAQPKRVHLEKEVGASQEDTDKSKAAGDWLKKLTHFAGSIANGAAKWLKENL

SEQ ID NO: 71517 - protein, 282 aa, Zea Mays
MVINVEYNQLDPLLRATGYPDGDTNSETGYSPYPGNINQLILELGPYIEELKKTHGAISEFVNPKYTDSTKTSFKSSTRLECMMQDYPKTLPPSTKVGFTVMDTWLAYAPVKNNPEDAAKVPKGNPYHSATSGEMAIYRANSLILRKAGAQIADPVVDTFNGQEVEVWPRVTWSPRWGLTFQSVKEKVHGSCSVSQRSALVIDGRSVFLDGLSLDGTLIVNAVDGAEVKVTGHVENKGWTIRHVDYKDTSEKEEVRIRGFKFNKSEQLEVNYTEPGKHSLSA

SEQ ID NO: 71518 - protein, 99 aa, Zea Mays
MRKQEAATRELGAQTGRAGHAVDWSSARAEDREGEAREFDELEMDRGNSELGYGRTMGRRQGRATGAHDGRPVSPWQGGFCSSIRLGRWRTSSTTRRAA

SEQ ID NO: 71519 - protein, 103 aa, Zea Mays
MANRTSCLVAAPGNHHRSLSLSHLLSLMLATATTPITWWLPIPAPKSKAPRRAPRRPAWLSRRGLFFSDESFDQVSSPPFLCVGLNLRSAFFFRPRQTCHAVS

SEQ ID NO: 71520 - protein, 80 aa, Zea Mays
MERLNTDMRAASVSISKGCRFLTVHGSADKTIPVEDAHEFAKHIPNHELRVIEGANHNYTSHRKEVADAVVDFITSNVTV

SEQ ID NO: 71521 - protein, 61 aa, Zea Mays
MYICVQQTTSVATTTIKDCRLCLCSLFCNTNECKETCATSLELENLVNSCLHTSCFMCENT

SEQ ID NO: 71522 - protein, 291 aa, Zea Mays
MELKKELQERPTQKLVDDLKKKVQILQAVGYNSIEAEDWELATNGEEMSKLEALLLDKNRKMEHELTQLKVKISEKTSVLEEAEKRIVELTSKVEEQQKLILKLEDDILKGYSSTDRRGSLLNDWDIQEIGSSEASEGSDPRHASADQDQSSMLKVICNQRDRFRARLRETEEELRRLKEKHEMLTVELEKTKADNVQLYGKIRYVQDYSHDKIVSRGPKKYAEDIESGSSDVEAKYKKMYEDDINPFAAFSKKIRTDVYILLQHRIASPCIYITVQNVSFELSQHNNSAG

SEQ ID NO: 71523 - protein, 1456 aa, Zea Mays
MLKDLLDYIIHACKAGLEDPDDDVRAVAAEALIPAADSLVRLNDQILHPIVVLLWDILLDLDDLSPSTSSVMNLLAEIYSQPEMVPKMLGTAASGEKGEFDLNEATQIAEQEDELTSIENPYGLATLTPRLWPFMRHSITSVRRSAIRTLEKLLEVGNTRSSAGTTPSKLWPTSILGDALQVVFQNLLLESNDDILQSSERAWKLLLQCPEKDLEYAARLYFSNWVQLATTPFGSALDSTKMFLPVALPRGNRSRAAAKIRSARLEHEYTTMISFGSTGESISHEKHSDVPSIFSNIIVGSDPDKSVTHTRVLTSMALGLFASKLPVSSWQVVLSPLANHLMSLSGVQRQVASMIIVSWFKDLRGRDPVSVGTLLAFLSSLKEWLVDLLTCSDPALPTKGSVLPYSELSRTYTKMRNEANNLLHLIDSCAAFKDYSSSLNLNTDVLTVDDAINFASKLLLPSESDIPSETENIFLNNIESAKQGLLSTSGYLKCVQNNLHVTVCSLVASAVVWMSCLPSKLNPVILPLMAAIKREQEEVLQDKAADALAELIFSCIGRKPGPNDKLTKNLCTLTCTDASETPQAAIINSMQVIEDQNLLSIGKRFSSHRSRGHTTSGGDERSKMEGFISRRGSELAFKHLCVKFGPSLFENLPKLWDCLTEFLRPVKTEDGIPEDDASIAQLGRSYEDKDPQSLINNIQVVRSISPHLAEPLRPQLLNLLPSILGCVRHPHVAVRLAAARCITSMAKSLTDDVMVLVIENVIPMLSDLSSVCARQGAGILLSLLVQGLAVELVPYAPFLVVPLLKCMSDPDGSVRQTVTHSFAALVPLLPLSRGASLPCGLSERLSSSAEDVQFLEQLLDNTQIDDFKLNIDLNVELRRYQQEGINWLAFLRRFKLHGILCDDMGLGKTLQASAIVASDIAEARARNDEKILTSLIICPSTLVAHWEYEIEKYIDSSILKPLQYVGSSQDRVTLRSQFDKVNVIITSYDIIRKDIDFLGNITWNYCVLDEGHIIKNSRSKITFAVKQLKAQHRLILSGTPIQNNVLELWSLFDFLMPGFLGTEKQFQAAYGKPLLAAKDSKCSAKDAEAGILAMEALHKQVMPFLLRRTKDEVLSDLPEKIIQDRYCDLSLLQLKLYDKFSSSNAKDEISTIVKANELEESAPQPKATRHVFQALQYLLKLCSHPLLVTGENPPNHLVDLLNEIGLGSGSELHELHHSPKLVALQEILQECGIGSEISSPDASTAVGQHRVLIFAQHKAFLDIIEKDLFQSHMRSVTYLRLDGSVDPEKRFEIVKAFNSDPTIDVLLLTTHVGGLGLNLTSADTLVFVEHDWNPMKDLQAMDRAHRLGQRKVVNVHRLIMRGTLEEKVMSLQRFKVSVANAVINAENSSLKTMNTDQLLDLFTSTPASRKASDEQSKRKSGGKGLKSILNGLDELWDQSQYADEYDLNQFLAKLNG

SEQ ID NO: 71524 - protein, 615 aa, Zea Mays
MLTVPSSPLSPTNGGSVKIVQMTPITSAMTTAKWLREVISSLPEKPSSKLQQLMSSCDRDLTNAVTERVSIVLEAIFPTKSSADRGGSLGLNCANAFDTLWADARKMEASKLYYRVLEAICRAELQNSNVNNLTPLLSNERFHRCLIACSAELVLATHKTVIMMFPAVLESTGLTSFDLSKIIENFVRHEETLPRELKRHLNSLEEQILESMAWEKGSSLYNSLIVARPSVASEINRFGLLAESMPSLDDLVARQNIHIEGLPATPSKKRAAGRDDNADPRSPKRPCNESRSTVVEHNLQTPPPKQCHMVLTSLKAKCHPLQSTFASPTVSNPVGGNEKCADVTIQIFFSKILKLAAIRIRNLCERIQYMEQTERVYNVFKQILDQQTTLFFNRHIDQLILCCLYGVAKVCQLELSFREILNNYKKEAQCKPEVFLSIYIGSRNHNGVLISRHVDIITFYNEVFVPAAKPFLVSLISSGTRPEDKKNASGQVPGSPKLSPFPNLPDMSPKKVSASHNVYVSPLRQTKMDLLLSPSSRSFYACIGEGTHAYQSPSKDLAAINSRLNYNGRRVNSRLNFDMVSDSVVAGSLGQPNGGSTSLDPAAAFSPLSKRKPDT

SEQ ID NO: 71525 - protein, 377 aa, Zea Mays
MEALKKQASKLREHVAKQQQAVLKQFSTRYSQDPSLVDEAELECHQNLQRLYSTTRAAKRNIVRGVEGFIAVSTKQMEIVKKLAGDCCKYGDDNQHFGFALARASEEFGKSHKQIEKEREDLLKILGEQIFEPLREMIMSAPLEDARLLTYRYQRIRQDMESQIADVMRKQLKSKESSGNTDNSVKLQHAESKLSDLRTTLAALGREATAAMEAVEAQQQQVTYERLLAMVDAERTYHQNAADILNKLHDEMLYAKHHNESANHYDEQSSEPESDAGPAQVHSRSTSEDPVLTKPSESTGNSQEVQFLGEVIHPFDAQADGELSLAVGEYVVVRQVAANGWSEGECKGKAGWFPSAYVEQRDRAPASKVIEPGLLTT

SEQ ID NO: 71526 - protein, 100 aa, Zea Mays
MEAQGSDEATVAGLWLREDCSGERRLDKTEKERAHRRVSRAADSKAELTVARDRARTRRWPQNRQRSTAAGGGALVARTERERGREDLAEGANERGEVGE

SEQ ID NO: 71527 - protein, 208 aa, Zea Mays
MVFEYMDHDLKKVLHHSAPSQVKVYMGQLLKGLQYCHANNVLHRDIKGANLLITGGKLLKLADFGLARLFTRDGTLTNHVITLWYRPPELLLGATSYAEPVDIWSVGCIFAEFLLKKPLFPGRTEQEQLSKIFELCGSPNEESWPGVSKLPLYKTMTIRPATPTKRSLRDILQNFDCPAVELIERMLILNPSQRISAQDALGAAYFIN

SEQ ID NO: 71528 - protein, 50 aa, Zea Mays
MVFVLWSSKVSEALKTRCSNSTRRHGLALGTASALTVQPVSSLLDFTRAP

SEQ ID NO: 71529 - protein, 485 aa, Zea Mays
MVESALEFARICRKLDFHNFVFSMKASNPVIMVQAYRLLVAEMYNLGWDYPLHLGVTEAGEGEDGRMKSAIGIGTLLMDGLGDTIRVSLTEPPEEEIDPCQRLANLGTQAANLQIGVAPFEEKHRRYFDFQRRSGQLPLQKEGEEVDYRNVLHRDGSVLMSVSLDQLKAPDLLYRSLAAKLVVGMPFKDLATVDSILLRELPPVEDAEARLALKRLVDISMGVLAPLSEQLTKPLPHAIVLVNLDELSSGAHKLLPEGTRLAVTLRGDESYEQLDILKDVDDITMLLHNVPYGEEKTGRVHAARRLFEYLQANGLNFPVIHHINFPETIDRDGLVIGAGANVGALLVDGLGDGVFLEAADQEFEFLRDTSFNLLQGCRMRNTKTEYVSCPSCGRTLFDLQEISAEIREKTSHLPGVSIAIMGCIVNGPGEMADADFGYVGGAPGKIDLYVGKTVVQRAIAMEGATDALIQLIKDHGRWVDPPAEE

SEQ ID NO: 71530 - protein, 676 aa, Zea Mays
MELNTRSSKGKAKTMAKILEEEEEEEEAEDDDDFFSSSGCGCFLCAIKEPDARLRRASLSAFFRELPYCEDDGGSNGQSCAAAVGAVWRAAMSAPDDPELPSLGAIRCMSLLLARALADAAWLRRGDNVYVPYYAAHVIGSYTIRSSAHAELAVAAGAVRPLLALLGGAMTWVEQRAAARALGHLASYESTFPAVARHAAEAVQLAVRSASTCIRDVYANFVALAPSRRPKYQRDLMTCGLGGGADAEDRKAEEWASQLQCWSLYLLSCLASRDLSSHAMICQDSLFLNELSRMWGGLANGDSPAGVGLLRLLCRSPVGRAAIAACRDALSSLCDLARSSDDWQYMAVDCLLLLLDDRAAWHAVADATAPWLSDLVDLRHLGPRRRLGDAIATALLLDDVHVVSDRKLGGEAKRAIASVRELKGERKEREEAMPRDELLKREILAKEKKRQGNDSFLQGDVDKATDHYSEALELCPLSRRRERLVLHSNRAQCRLARREADAAVSDATRALALARPANAHARSLWRRAQAYDMKGMARESLLDCLAFAGAWLDGRRHPRRAARGANPKLPYCVARMISKQMSVTGLFAGVTMKDNKVGSDDCMPWCSENDRDNEDGEDDPDDDDESEEEIADNAGLKMCTSESCQSSREMLGRGCPGGRKSAFCLLSMIHRRKLAS

SEQ ID NO: 71531 - protein, 62 aa, Zea Mays
MQMERKESTAPCKKDKSVQASAAVVRRTFNKKLFKRESGAALGRSRAFSSTPTIGGVHLGLR

SEQ ID NO: 71532 - protein, 161 aa, Zea Mays
MLEMIASELEALSNQLAELEEKMKFLLLPSDPLDSRNILLEVRAGAGGDEAGIWAGDLVRMYQRYCERNNWKFKPVSCSEAEMGGYKTYVMEVKGKQVYSKLKFESGVHRVQRVPLTEAMGRVHTSTATVAIMPEADEVDVVIDPKDIELKTARSGGAGEC

SEQ ID NO: 71533 - protein, 226 aa, Zea Mays
MADDPNMNFGAFSQSLCNQHVVSFQTSVATSGSGGMPTYLDCSTGMDASVGMLTTPSVVVSTGSSNMPADSGQSLKYGGPLAADWTQVELEILRDGMEKYVHEQGIMKYIKIAASLPNKTVRDVAMRCQWVGKKVNTRRRKPQEHHTGRNTKERKDKFVEPALWGTNHPLQTGMTASSFVPHNGQNAMFISGGYINTAANTRVTELLHFINDSIAKFIAGRHPTGA

SEQ ID NO: 71534 - protein, 459 aa, Zea Mays
MGIRACSVCWLFYVLVLVCSLCQILYVGSVAAQTAQLTVDASPQNAQIIPGNMFGIFFEEINHAGAGGLWAELVSNRGFEAGGSNTPSNIDPWLIIGDESNIIVATDRSSCFASNPIALRMEVLCGASETNACPSGGVGIYNPGYWGMNIERTNVYRVTIYIRSSESVELMVSLTSSDGLQNLASHTIMGDKEDFVEWTKVEFDLQSNYINTNSRLQLTTTKSGIIWFDQVSLMPSDTYMGHGFRKDLASMLANLKPRFLKFPGGNYVMGNYLINAFRWSETVGPWEERPGHFNDAWAYWTDDGLGFFEFLQLAEDLGACPVWVVNDGASIYEGVPSATIAAFVKDVVNGIEFARGDPETAWGSVRAAMGHPEPFQLYYVSIGNQECSKYYYKDNYVKFYSAIKASYPDIKIISSCDRSAISSDNPADLYDVHVICFPNLECLIIQPVPDPRQLLVNML

SEQ ID NO: 71535 - protein, 682 aa, Zea Mays
MGVAAWDANLVTPHKRMGNAGLYLESFCDGNNHGVTVELEGLGGGGTIEIEVKYKSYDDIEREKQWWRIPFVSDFLVKSSLGSALRMVLGSESINASQFVKSAFGQLSSFTYTYLPKPSSLESGVDVSKSDEESSDGPTNSNELQQQNIDSEIISDSHSHSEVQSPTAVVNSEGNSSSDMKKSDEYFWRALNNVLNQNVLQNFGFSLPEVKQLGGFDLLSSLGLKSRNIAEQEYLESGLAMADTSTNGGSETTSENTVGVENENRTLTTKEEVQSSFPDINKVSRDVLSQTENILGALMILSKNLSPHDQSVPTTGTNGKYDMIREEQGASAADSVQKADTVSSALLSIDAQEAEDMRRLFASAETAMEAWAMLATSLGRNSFIKSDFEKICFLDNISTDTQVAIWCDSSRRRLVVAFRGTEQSRWKDLRTDLMLVPAGLNPERLGGDFKQEVQVHSGFLGAYDSVRNRIMTLIKYAIGYDDEEDAENIPRWHVYVTGHSLGGALATLLALELSSSQMAKVGNRRFAEVYNAKVKDSWRIVNHRDIIPTVPRLMGYCHVEAPVYLKFGDAKDAPVNNSILDDEDQGDVIGEYTPDVLVTEFMKGEKQLVEKLLQTEINLLRSIRDGSALMQHMEDFYYVTLLEVFENYFCFSHTKLCQKLLKNVRSSYQVADTANDEYQLTA

SEQ ID NO: 71536 - protein, 564 aa, Zea Mays
MLPAVAAASPGLSHLPRYHHLGRRFHLRRHRLLPAIPARLSCGATHARRLLLAGAFAKGEGSSGQDVDHSAGATNSGSAYLGLFVRLLGLDNDTRDREHAVCTLYQYSLGGRKSIDEIMQFPGCIVLIISLLKSESILACEAATGLLRNITSVHIYRKMAGESGAMEEIINLLCKSTITPKILEQCLCTIWNFSIDEKWRYKVLKSDVLMKIVGYLDEEDIQVKEAAGGIISNLALSSSSHGALVEVGVIPKLVHLLQTKEDDYKIIRKEAKSSLIQLATDDCYYSLIIEEGLVRVPLVGSAAYKAFKPLPHSWPSFPDGSKIQRSSHPSKYGATELLLGLSVNENDTKPDEAKINAMIGRSNQQFLARVGAIELDDQGQEESGSEKNDMYTILPWVDGVARLVLILGLEDVSAIKKAARAMGDASINEHMRTSFKEAGAVKPLLQLLKHKDVHVREAGAYALEKLCVSATVCHNIKTEGGLELLVNIVKDRHTPVELLEKIIYILSRMFDMGICMVAVPDTEGYKDSENSAKTSVNQEMSSFSEDPLWDTQIFKTQLMQSMAS

SEQ ID NO: 71537 - protein, 175 aa, Zea Mays
MAGSGNRRFGQDMVSSSTHFSQWQMVWVGDHVPGGRVDLQCGGPIWPPMSARSGANSDSLAVTTFRCSFRCSDDLSLHPWISRRLGTRHRNEGNQESKRPRESQSTRRGTRELGIVKRARGDELLRFMDGASKEPLRKVNTNTQFLFNPWSFPEIWCYNPCSFDSLLQLGAITNS

SEQ ID NO: 71538 - protein, 290 aa, Zea Mays
MVLSVALIWILGPSSWHMIYGMDLNTDKGLLLVADNFGFLYFLDRRSKTRIGHPILIHKKGSKVTSLHCNPARPEVLLSSGNDHYARIWDTRKLEANSPLASLAHGRVVNSGYFSPRSGNKILTTCQDNRIRVWDYILGDLQSPSREIVHSHDFNRHLTPFKAEWDPKDYTETVAVIGRYISENYNGVALHPIDFIDTSSGKLLAEVMDPDIITISPVNKLHPQDDILATGSSRSIFIWKPKIEDELTEERAKHDNSSDDDSGGDSGGKNKKAKKTRFTHAVKGKGKSKV

SEQ ID NO: 71539 - protein, 122 aa, Zea Mays
MMTDLRYPMKGNTVPFWAVPLIGIILPWAIFVGIYFKKNNFYDLHHGILGILYSVLITAVITDAIKDGVGRPRPDFFWRCFPDGNDVYDNITTGVICNGVKSVIKEGHKSFPSGHTSFRPQE

SEQ ID NO: 71540 - protein, 98 aa, Zea Mays
MSSAEGVISSELAPTELKTFFNRCTQLLPKFKHVSRRSSKDFCSFVFLSASASYFACRSFFSWSKFFDFSFNVVRLWRSSSLNLTFSAWISASEPYVA

SEQ ID NO: 71541 - protein, 1012 aa, Zea Mays
MADGQHIQAASEEVDSIHFSFYSDDEIKRISIKKITKSERLDAKNLPVPGGLLDPAMGPINDIDICKSCGQHSVRCPGHFGHIELAKPLFNPLLFMSLKNLLHVTCFHCHKFRLNKEQVDRYVNELELLVKGDIVCAKNLEDSVEEAYLSKEDENMNKTTSGDNSSSVKDKKTWTSIQLKEVLSIFSKIMKKRQKKCAKCDMKSPTISSPIFGWLVKDTKASAVRTNAIADFKLKGDGDIHNSGETGVSGLEEESSSPGMVSKDSINEVRGLSDDTIKELVASSGKKHLLPTEVESILKDLWKNEARFCMLLCDFQKNMSSEPEKRRGYEMFFLSSLLVAPNRFRPSTSSSLGIMEHPQSVLLSKVQESNLALQHNNASSNHMDVLQRWMDLQRSVNVLYDSSKGLARSEKNAHGIRQLLEKKEGILRQKMMGKRVNYACRSVISPDPYLAVNEIGIPPVFATRLTYPEKVTPWNTKRLQEAIRNGADIHPGATHYRDNNSMYKLQAVPAKRRSIAKMLPASRGSICQPGRDPNCEFESKVVYRHLQDGDIVLVNRQPTLHKPSMMAHFVRVLPGEKTLRMHYANCSTYNADFDGDEMNVHVPQDEISRAEAMNIVDANKQYIGPRSGDAVRGLIQDHIVGAVLLTKPDTLLSREEYSQLVFGSCVPSSNCGSHHPAKVSAIEDYDTLELVHPAIWKPRPLWTGKQKGKIPKEYLKEDPSAQKEKEDPSARKEAHSAKKGKREDPSAQKEKDSSVNKEKQEKIQKQKQKDRSELVLYIHNNELIKGIIDKAQFGKYGIVHTVHELYGAYTAGILLSTFSRLFTLFLQLHGFTCGVDDLLLLPEKDKLRSKILSGSEVRSNEVHWKFTGADEDHKGDLVKLHMEVEKAVRSNGESDTATLDNDMKNALNGITTDVNKILFPDGLQKPFPGNCLSLMTTTGAKGGPVNMNQISSLLGQQELEGKRVPRMVSGKTLPCFPPWDISSRAGGFISDRFLTGLRPQEYYFHCMAGREG

SEQ ID NO: 71542 - protein, 76 aa, Zea Mays
MGRLPRSPPAQIGPLGGHLLTRPSATRTTSRRVKGRLLRKREQKMVVQGSKLIRKIASEAFGRAFGWCPRYRRISG

SEQ ID NO: 71543 - protein, 91 aa, Zea Mays
MLLAIVSPFLLVVCGSAHYSRALLFSPGVPSVAPWPAELPSPVRAPISLCSTPSSPWTRAAPSRFLSMAALCLPLPRPSRSRSGLSLRGRR

SEQ ID NO: 71544 - protein, 111 aa, Zea Mays
MALPSTLDCLLCLVPINMTRKSFERTGNKLWSAISGQRQRHAVDVAVHDEYFAALGNLHGVGLDPQLTVVKDLLHSVPALIFHHRLSPARCYSVVDDDARTYKSIFALQKA

SEQ ID NO: 71545 - protein, 94 aa, Zea Mays
MFLTKSLFDLVLTHDLTYCRSSNPSNRFNNRGGFQAGRGRGQFQSWGRGRGQFQSRGRGRAQFQGRGRGRKPEKTADELDKDLESYHAEAMKTD

SEQ ID NO: 71546 - protein, 128 aa, Zea Mays
MYPHCLFFLELLQNANFRNAMAHPTNKELAHRQQYFFWKNYRNNRLKHIIPRPPPEPAPSQAPATLPLQASVPTPVAPPVPAPTSSMPPVVAGGASAMSPMQFVGTPGTNMPKNDMRNAMDNRKRKMG

SEQ ID NO: 71547 - protein, 51 aa, Zea Mays
MHRYYRYLNSLSRTTVLSKGRNQMNVLGEIHVLLLLLTPDSTAHINVFDMI

SEQ ID NO: 71548 - protein, 50 aa, Zea Mays
MILGKEGQRSFLPPVGSSLLDPQLVPSLLSSVSRRLEPPAAPYPNSHPSA

SEQ ID NO: 71549 - protein, 53 aa, Zea Mays
MFSWVRTAVVFAFCCWAMNIALSWDKVSFYVSCCLLVSTLPIEGLVFSCTYRV

SEQ ID NO: 71550 - protein, 106 aa, Zea Mays
MTQTPVPVSPAAPSPIPASRARPEPRRSLPPKVRHRAGGRPVVFVPCRPHGCLPVCCLGVCCSGRLALACSGFKRNAFRPLPLSSAPLDPPIATSSDPPHDWGWTN

SEQ ID NO: 71551 - protein, 60 aa, Zea Mays
MSTYSHLKVQTWTSAHQRKAGHQIFQELKIFSDYQQRFSLRRNLDSLLSSPLVATRQSSE

SEQ ID NO: 71552 - protein, 179 aa, Zea Mays
MEVPWLLLVHGSVTALVVVSFLCGQWPIFEGTFIQSINHFLTFGAYHYLLRFVQSVCGTGARDLVLGVEGYCCDRPNPILQVFYVAIIGVTYFIIVQTSFQYIPGYYVSGLHRYLSVVAVSVGAILFVLTSFSDPGTVTAENVSQYVSSYPYDNIIFVEKECSTCKITRHSNGKTTSCG

SEQ ID NO: 71553 - protein, 183 aa, Zea Mays
MDTSALTSAPPYARPASRELSLSRALTLSGPCSTARALAPRRLLSPSALPRIFISLLSSDFPALCSPMEFAELHFCSAVPLTSLPWPRPGICRSLFPSPRAASFPWHDCPALLDGRVVAQLAELPCRGRRVPARSSAPAARPCCACRTLLVRARSSPLASACQVSVSSFSLPCRLSVFDPRLD

SEQ ID NO: 71554 - protein, 76 aa, Zea Mays
MMMMMMMMMMMMMMDEMHSRTCASRSRLRQRIDQPNSVYTSPFSLWLDMLQSIIVKQQEEHIRRTCLDCGLFYKEV

SEQ ID NO: 71555 - protein, 217 aa, Zea Mays
MTRDGVNDAPALKNADIGITVAYSTDAACSASDIVLSEPSLSVIIGVVLTSRAIFQRMKNYMFDFPPFMVLIIAILNDGTIMTVSKDIVKPSPQPEGEIFATRVVLSAYLATMTVIFFWDAYKTDFFPVWTSNCYSDYRIRQLGICYDQGHWMRLGRHIWLYNIISFFPPDIIQFLIRYALSRRAWNLVLEQREATTMNPSLRKMECQECFYTTSKF

SEQ ID NO: 71556 - protein, 56 aa, Zea Mays
MALHVSYVVLAALCTHEAHCGSHLTNSGVIEWERGLGVTGSAARVGRALSMYASQN

SEQ ID NO: 71557 - protein, 191 aa, Zea Mays
MESTVNPKAYPLADVQLTMGILDIIQHSTNYKQLKKGANEAMNTLNRGISEFVVMAADTEPLEILLHLPLLGEDKATHSNELRILICTKNDVCKLWYILNYLLSKTFRMAASMSASADSVAPEDCLARQLPEILGDLADRTGDGDSSASITADSSGLQHGLCGSFGWLQFFFGRKDNGSRFSRPSYLTIEI

SEQ ID NO: 71558 - protein, 79 aa, Zea Mays
MVVVEVVVVVVVVFPTVIALFLDVSPDGPDVFPHVLVLSDFAFRSPCLSIVVLPAFGQQPLDRFQQMEDLEDSFLLAVV

SEQ ID NO: 71559 - protein, 105 aa, Zea Mays
MNIRDTGDLFYRGSALEGLVPIEESTKDGSLLTLSLSPPITKDRRALLLLKDHLRPRKDHHTLWCLLLALQASKTLEEVQWESKLHAQMNTRCRTHFLSMNLTRH

SEQ ID NO: 71560 - protein, 258 aa, Zea Mays
MVPTHGDTAGPSSSQDDPAASVKKRNSNRPQYHPFTQQQLPACKPILAPQTVIPVLLFVGVVFIVIGLGCIAASNRVVEVVYEYETSCIPRHMLGNKVAYIQNPSIDKTCTWILKVPRDMKHPIYVYYQLDKFYQNHRRYVKSRSDKQLRDPKEANSTQQYCKPEATTEHGSAVVPCGLVAWSLFNDTYSFARGNNRALRVHKRGISWRSEREHIFGKQVFPRNFQKGALIGGGTLDPRIPDRGGPPRRRAGHGDDAE

SEQ ID NO: 71561 - protein, 222 aa, Zea Mays
MRSSVASAALLVTCLVVAAAARSTGRTTLSVLSFGAAGNGVTDDAQALVAAWQVACRVPRATVLVLPSGHRFLLSPVTLQGPCSAKLTLQIDGTVLAPPEMGSWPKPRRPLQWLNFKWLQGFSIQGTGAVDGGQQNIYGYRALAFARSQAYADKVLQQLQCQRAQHPDQQQPAVPPQVRQLRRHQGEERHHLLPRRQPQHRRHPSSEHQGRRDQELDHRLRR

SEQ ID NO: 71562 - protein, 346 aa, Zea Mays
MDNDNEILVYVAAAHMMLCMMAMVIRSTNTNRHAHAPVGQITYGPIDERDRKRFEYLNDKIWRNDVTCVDMLRLNRGSFFRFCKLFRDRGLLEDTIHMCVEQQVAMFLHTIGHNIRNRVIRTNFGRSGETVSRYFNKVLHAVGELRTDFITPPSSATPAKIQGNHRWDPYFKDCIGAIDGTHVRASVPKEMEAAFHGRKSHTTQNVMACVDFDLRFTYVIAGWEGTAHDALILRDALERQNGLRVSEGKFYLVDAGYGAKRGFLPPFRGVRYHLNEWGVNPVQNEKELFNLRHSSLRITVERAFGSLKRRFKILDDAIPFFPFSTQVEIMVASCIIHNWVIEDGGD

SEQ ID NO: 71563 - protein, 568 aa, Zea Mays
MATAAPGPGSRSRLLPLALSSFLLLLLLLLIAPGAAAQPWQSCGNTDNYSANSTYQSNLASLAKALPANASRSATLFAEGSAGALPDAVYALALCRGDINATACGACVTTAFQDAQQLCAYNKDAAVFYDACYLRFSNKDFIASATNNGDAIVLMNSQNVSPPVRAFDAAVAVLLNATADYAAANSSRRFATGEEGFDATDPTIYGLTQCTPNMSPAECRTCLRSIISDMPQYLSGRRGGRIIGMRCNFRRPARDQTSSYSVNQSEIESIDSLLLDISMLRAATDNFAESNRLGEGGFGTVYKGVLPDNQEIAVKRLSQSSGQGIQELKNELVLVAKLQHKNLVRLVGVCLQEYEKLLVYEYMPNKSIDTILFDSEKSKELDWGKRVKIIDGIARGLQYLHEDSQLKIIHRDLKASNVLLNSDYTPKISDFGLARLFGGDQSREVTNRVVGTYGYMSPEYAMRGHYSIKSDVFSFGVLILEILTGRSSSGSFNIEQSVDLLSLVRHYTIPKPTKVFASEMITKFAFDTGLGALDNGNNCGDHGSISERQSSCRTDAEKCPYRATVCSR

SEQ ID NO: 71564 - protein, 183 aa, Zea Mays
MFVELSSPLPLCSPADARPCAAIVVAAPCAAALARPASLRGSTCPYMVQLTASARSQSTPPQRASAVTRSQLAHGSRPACVAARGQPVRNFYATAHVRAHARYALQRHAHCHTSVAAALALACAQRVTGSPSMSVYHCSRPSTPLMHVFIVRCIVFVRHAPCALSCIDSLFYLESLVLIKLLI

SEQ ID NO: 71565 - protein, 266 aa, Zea Mays
MNSKRRRSHSPVEYKEGRDKDYGTSGKKDKSRDLDDTCDARRGHETDRHSDKHSFGTSRESKKHDDYRRYHDKYGDDYGRSHPRASRSDRESRADTYYDRSKHDNTSGRSRGDQRDVGSRYGEKSVNRDQRSINEGKQESPRGYQKNDGGEYNKHMDARKQEYKGYGDDRDHYRVVRKNKETIKEEEDSKRRNGKEIEKEALVETRDKKRSLFSSTGPNVDNPGDVKLSSATNEALDNAAETVDGVNAAKVAAMKAAELAMLHGLK

SEQ ID NO: 71566 - protein, 61 aa, Zea Mays
MIVTEIICLNIIAIQLHSSVTYRHCEGRCLRSFHATNNSSEDYPILGHNMQQLDVSITILL

SEQ ID NO: 71567 - protein, 481 aa, Zea Mays
MSLKSDIYSLGVIMLELVTGSKEEPDITNVLRRWSHRWKKSGQRTPSFQRHQVSKCIGLAKRCKEVEPTRRPSICDILAALGKMEDMNCSDQQVDEEVTYLEDMLGIEPLDLHFLVEPTKQISCSVHLTNATNDCFAFIVQTTNPKQYCIQPDRGVVPPRSECSVAIVLSQEPTHNKRCSMEDELSVQSTRVDEGVTAADVSEALFTGKEDRTVDHVSLMVGFDMSPSPPEEQTEDFTFAPLASLYDEEPQLSAAKSARLQLGRSGRFSKKKLVSILKSWRARLKVSSHKKLETPKHDCEIPEAVEHEEVAAPRCPKGPLPQRDLSPLGEACSRMNMTAIHEILVNRHYRDDDLDPNVPSLEEWTQQSRDMLDDRKRGDFTFRDKDFRAAIDWYTKCMDVGPKKASPTVLVRRSCCHLMCGNLDAALRDAMQAQRQYPDCPTSLYMQAVALSKLGMHSQAMGMLIEASEMEANQKKTRKAA

SEQ ID NO: 71568 - protein, 898 aa, Zea Mays
MCSDMSGQRHHHATSRENAPEDNGYHRTPHGADHLEQSQAADTDNKHINHLSTDDNVPSSASGHKHGAISRHPSTSSVDDRSIKSGDDSDGAESTSGRSSNTEISFMNNDTIWIPPQAADKEDEAQSFATSIAYDDDDDDYSDGIKWGQSSFPSPGKQHDADTSNHREEREKAMLEAMNGQLKVLVSRFLASAGIPSSNEEGSDSWLDIVTSLSWEAALLIKPDGSMGKEMDPGSYIKVKCVASGTRRQSEVIKGLVFKKNTAHKHMPTNCHNPRLLLLKGVLGHSDIGLSSFSSMDQEKDLLERAIGKMMEICSPNVVLVEKTVSRNIQELLLKEVLDKPKLKQCDYFHIEKFIEEHNNASEGGKMPSKTLMFLEGFPRPLGCTILLKGANSEELKKVKQVMHFTVFAAYHLILETSFFEDQRVFLNDKSTPKEISVTATEGASPTAYDVAALSGAIPSFPSHENGDAFSSVSSSSANDLEQGTSIRPNNAERLTSLVQGPLRKLFTDMLRHQNIYLPVTSLQEANDISKEVRAESSQETVINGFHRPEIEESVVSIENGDSINDAQKQEIAQAIMPRGSSANDKDAESSVMGDNGAHSTSIIIKEKYVDDDQADDALDSHSILILMSSQCPEKQVICEQSHLTRIKYYGSFDVSLGRYLQDILQNQKLSCSSCGEPPESHMYSYTHRNGNLTVLVKHLVPQHHLPGESEGKVWMWTRCSRCDHEHGVSKPTPRVLISAEARNLSFGKFLELSFSSHSAARRLGSKVAMFRYSSVEIYTTCKPQPTLQFVNPIRQDWFEGQRRNVHAKGMALFSGVARFLQNLKNEHPDAITLAIHCGLAFPVKDFTELEELLIKEKAQFESSVDKATDQNGVPTSSVHELLNINCFGGSQYHRTCK

SEQ ID NO: 71569 - protein, 68 aa, Zea Mays
MCLIRITSQAYKGWRKHYSNKALQQAMISLGCLRISRGVDHKTPYNMMIGVNNNHKNLSMILRYLEAI

SEQ ID NO: 71570 - protein, 339 aa, Zea Mays
MVSTARAALPTPHLSLASSSRRRPHLFFTPSSAPRLRGGAATSITAGSSASPQQHQVTTRLGDVIEAQQFDRDSLNEIFEVAREMEAVERSSHGAPSRVLEGYLMATLFYEPSTRTRLSFEAAMRRLGGEVLTTENAREFSSAAKGETLEDTIRTVEGYSDIIVLRHFESGAARRAAYTANIPVINAGDGPGQHPTQALLDVYTIKREIGTLDGIKLGLVGDLANGRTVRSLAYLIAKYQNIKIYFVSPDVVKMKDDIKDYLNSQGVEWEECSDLLEVASKCDVIYQTRIQKERFGERIDLYKAARGKYIVDKKVLDVLPKHAVIMHPLPRLDEDRSSA

SEQ ID NO: 71571 - protein, 216 aa, Zea Mays
MLIILTILVYLTFAPENSNILGPHLDTCLKTLVFSEEWSESAVLLVLSGMKEPGPTTLALGIDLTSLGLNLNSQDNLYKTFGSPWSSEPAVGEPDYQIPACFSAKPPPALQKFHPLTLFYIFYSMPKDATQLYAANELSSISSVLLEVCSRGGVRRRYILLPHTSTLAIQILMLERLPHQRKRGEPQPGVKEYYGMEMALQQSVSLSKSQNTALDQ

SEQ ID NO: 71572 - protein, 228 aa, Zea Mays
MDNLPLVKSLVQNLAANLHVPVSVKIRVFPRLEDTLAYAKMLEEAGASLVAVHGRTRDEKDGKKFRADWDAIKAVKDALRVPVLANGNIRHMEDVKNCLEHTGADGVLSAETLLENPAVFAGFRTKEWKEDGDENGDGGLDQADLVIEYLKLCEQYPVPWRMVRSHVHKMLGDWFRVHPEVREELNKQNKLTFEWLHDMVMRLKDLGGRVPLYRKETALGQTLASSNA

SEQ ID NO: 71573 - protein, 363 aa, Zea Mays
MWCLAGAAGLKDSGNQAIMKFPEIQAAASALRNTRGLPWPKTYEHKVNEDLLDWLQAMFGFQTDSVSNQREHLILLLANIHIRRNPKTDQQSKLDDNALNDVMKRLFKNYKKWCKYLGRKSSLWLPTIQQEMQQRKLLYMGLYLLIWGEAANLRFMPECICYIYHHMAFEMYGMLAGNVSALTGEYVKPAYGGEKEAFLKKVVTPIYHTIAKEAERSKREKGNHSEWRNYDDLNEYFWSADCFRLGWPMRADADFFCQPDERNESTRISKQKGKVNFVELRSFWHIFRSFDRLWSFFILALQVMIILAWDGGSLASIFDYAVFKKVLSIFITSAILNLGQATLDIIFNWKARRTMEFAVKLRY

SEQ ID NO: 71574 - protein, 88 aa, Zea Mays
MAGASMTGACTPAEQLGARGVGRPCPALWRLWPACSWWPARPCPVRRRTVLQSPWAMAAREQRDDERRREHARFMHKGNGVFSCSNYT

SEQ ID NO: 71575 - protein, 188 aa, Zea Mays
MQVTFDLQSIPLYLSEMAPPRYRGAINNGFELCISLGILFANVLNYFVIKITAGWGWRISLSMAALPAAFLTIGAIFLPETPSFIIQRDGNNTDKARVLLQKLRGTASVQKELDDLVRASDLSRATRYPFRSILERKYRPQLVVALLVPFFNQALRGRGALSPSWSLPRFARWRSGPRGRASWSLWFS

SEQ ID NO: 71576 - protein, 431 aa, Zea Mays
MATRNEHRFRRETRASIIIQEKHNEQFLESQTRWRQHRAYAAYKQQQKASLILQCLWRARIARKELRKLRMEARETGALKEAKDKLEKRVEELTWRLDVEKRLRADLEEAKSHEIEKLQSALQKMQENLEEAHAAIVNEKEAAKLAIEQAPPKIVEVSVIDNAKLEELTTQNKELEDELSTFKQKAEDLENKLIEFQKQSDELSQETQEQASKVTQLQELVERLESKIATLESEIELLHSNSALAIQVVVTPEMNQTTVIEEFDKGHQLEEVKTVNNSICTYVCIGYHALISHEILRYFLTLVFFVIEAHMLCCYAIMDCLDDADLLAKRVWRFEPISIVFQVTANGVGLLDPGVESNRIFFFRLKHVQQVELSNPNVEIRLLEVFYHKIYKSTTRQPSTTPNRELYLGVKVHCGEEVAIKLGHFEHIKIH

SEQ ID NO: 71577 - protein, 122 aa, Zea Mays
MGLGEAAGRLLAAVDWEREAYPAYDDFLALPVFVLFFPTVRYLLDRFVFEWVARRLINRNGHQSTNNETEEGRKKIRKFKESAWKCVYFLSGELLALSVTYNEPWFTNTRYFWVGPGEQIET

SEQ ID NO: 71578 - protein, 143 aa, Zea Mays
MLVVGVTSGREREGFPSLYELLVLRDYILGVRYLAKSIECRCSVPSALLVRPLGTLLFFGPTLPFYRLRRGSVTSGFLWKELPRRGKTKGSILGRILFVSIRPCLLSTLVGLYKPSVMMRMGGERPRRHHYTFCSASTPTFIA

SEQ ID NO: 71579 - protein, 118 aa, Zea Mays
MSSASSSAAAANAGEGSGGAEEGVEITYVSYGGEQHLPLVMSLVDEELSEPYSIFTYRYFVYLWPQLTFLAFDARDGKCVGTVVCKMGEHRGAFRGYIAMLVVLKPYRGRGIGLRKGG

SEQ ID NO: 71580 - protein, 851 aa, Zea Mays
MRSQLNASFSPPPSLRRALPSATPRALRFHAFPWRFRAPQHHGRGAGARCATNLPAPGSHGVGVLASERRADDGDTTVKNADAPSTSTATQGNLNMAAIVSIAFCFLHRIVSGRMQSMMNLFPWMSNGIASLPFACISDPTRKPMPLKLDLTLPPLPDFGWNFSRLYYRFNSQLDRNIALSIITLLITCFSFVIVGGLLFHKFRKQQQSLEDCFWEAWACLCSSSTHLRQKTRVERVIGFFLAIWGILFYSRLLSAMTEQFRNQMHKVREGAQVQVIEDDHIIICGVNSHLMSILNQLNKYHESSIRLGLATARKQKILLLSDLPRKQIDKLADSLAKDLNHIDVFTKSCSLSMSTSFERAAAHKAKSIIILPAQHERYEVDTDAFVSLLALQPCKQIAPVPIIVEASNATTCELLKSITGLNVQPVEMVASKLFVQCSRQKDLLKIYKHLLNQHKNVFNLFRRPELEGMKYMDVRRKIHDAVVCGIFRSGKIHFHPSEEELLKETDKLLLIAPVRGMKRPQYRALSVRKETQTLSRNSEPREGQGSFNMATTMDNETRLNNIVKRPLKSLSKSSDYMLGPKECVLIVGWRPKVTEMIREYDNYLGPGSTVEILSETPIKERSSIINPLLQSQLKNVKVTHRVGCPLNYDTLKETIINVRESAKSDKEVPLSIVVISDRDWFVGADAAQADKQLAYTLLLAENICQKHGVMVENLVSEIVDMGLGKQISKIRPSLSFIGAEEIMSRVTAQVAESSELNEVWKDILNAEGDEIYIKEIGLYMKEGEKISFLELSERAVLRREVAIGYIKDGKQHINPINKSEPLSLEMNDSLIVISEFEGEQPIMMGGETSG

SEQ ID NO: 71581 - protein, 666 aa, Zea Mays
MGNCTNRKVRMAKVTTHTSAEASRSCETIGTESSKSNHGKNQQVDHANPVALNTEQSFPLIVNSLGTLGDNHQYHLLETTEGLACKFKKVPQSLAAPLKRLEKRDNVVLGSNNLGSSCFTADLGSSVLGKSGDKSNRMKDIGANLSSKHNDHGNQANQHTLVGSKNMEGKSVKAKHTVVDAHKNTSWTVDSLINVKDKSEVYGDSNRDILNDVTVQLDHRASNELLPRSTATNIPQLATLENDVVDTVMPYSPNGGCEESFSCPGIKNTPSVRERSVDPINISSDSHDTIEASESSERFMECQKASLCRRRKTVKMAMVSSSSEESGEDTISENVSLGYVLACRSSLSKAQKKRVTKLIQEIQPEFTVFISIMRMSNVKLPGPLLGITKEYAIAHFPDKTTNVTLETPGKSKKWHPKFYKRDESRKNLLMGQWLDFVRDNHVQEGDICLFLPTKDEIRHTFMVYILHETTHSRCGAGFQRVGPCLGGASSAKMASEVHIEDEPTAGEHVSSDSDMPENSHEPLESGDSDDPFEPPYFVPCRSPLSKSQKRMVEQRVRAIRSEVPICVAVMKNNNVGIAQRWMLELCSRYASVYLPTKGQNILLQCKGKTWEAKMMFHNGRRWFLNGGWPDFARGNGLRVGDMCLFELKKKKSTLTMAVHIIRKEQF

SEQ ID NO: 71582 - protein, 114 aa, Zea Mays
MIWIITAGGAVQRDDPCHRWLRRRREPVYVQRQCAVLELLQGRRHLMFGKLTAINSSFLLFEYKKSRDGHVYDRFSLARLPSPGGLLRRQLPPKHLGRLIELRTLETCVDRYTV

SEQ ID NO: 71583 - protein, 62 aa, Zea Mays
MSIRSATPTPQATETHCARGMIQRQEGQAGSRRPYRQWHRTGRKQLRCRRVASCHGRPLSSF

SEQ ID NO: 71584 - protein, 444 aa, Zea Mays
MNALIRVSSVISNSPIILNVDCDMYSNNSDTIRDALCFFLDEETGHRIAFVQYPQNYNNLTKNNIYGNSLNVINQVELSGLDAWGGPLYIGTGCFHRRETLCGRRFTEDYKEDWDRGTKEQQQHRHRVDGETEAKAKSLATCAYEHDDDTRWGDEVGLKYGCSVEDVITGLAIHCRGWESVYSNPARAAFVGVAPTTLAQTILQHKRWSEGNFGIFVSRYCPFVFGRRGKTRLPHQMGYSIYGLWAPNSLPTLYYAVVPSLCLLKGTPLFPELTSPWIAPFVYVAVAKNVYSAWEALWCGDTLRGWWNGQRMWLVRRTTSYLYGFVDTVRDSLGLSKMGFVVSSKVSDEDEAKRYEQEMMEFGTASPEYVIVAAVALLNLVCLAGMAAALDVFFVQVALCGVLVLLNVPVYEAMFVRKDRGRMPFPITLASVGFVTLALIVPFF

SEQ ID NO: 71585 - protein, 306 aa, Zea Mays
MMESCKGVLGGTKEVAVKRLSKGSVQGMEEFKNEAVLIAKLQHKNLVKLIGCCIYEDERLLVYEYLPNKSLDYFLFDSSKKSVLQWTTRFKIIQGVARGIMYLHQDSRLTIIHRDLKTSNILLDKEMSPKISDFGMARIFFGKQLQANTNRVVGTYGYMAPEYAMEGSFSVKSDTYSFGVILLEIVSGLKISSPHLLMDFPNLIAYAWNLWKDGKSEQMVDSFVVESNCPLDEVSRCVQIGLLCVQDDPGSRPVMAVVVFMLENRTTPLPTPKQPSYFAQRGYKPRKAGDHREVSTDMSLTALEAR

SEQ ID NO: 71586 - protein, 220 aa, Zea Mays
MASAARAKEGPGKLGATGKAGYVDSSGDKSKRSVVEIKGRFSVTSENVDLAKVQEGPLSSLSRKSPEGSLLRKSASTGDYFVNPKLMCNANQLKELCNSSVSSSVLIPHLNNLVQQTMFQQDLIMNLLSNLQQSEKVDGTQPIISSQVRTMENDKVADTVNSVKERSLLVKISELQSRMIILTDELIAAKLKHVQLQQELNALYCREEIVDIRDEDNEET

SEQ ID NO: 71587 - protein, 447 aa, Zea Mays
MDEPLLGNGLKTSGKRESLVVAEVRKQMYLAGPLIAAWILQNIVQMISIMFVGHLGELALSSASIATSFAGVTGFSLLSGMASSLDTLCGQSFGAKQYYLLGIYKQRDPEIAAGAGSYIRWMIPALFVYGPLQCHVRFLQTQNIVLPVMLSSGATALNHLLVCWLLVYKIGMGNKGAALANAISYFTNVSILAIYVRLAPACRNTWRGFSKEAFHDITSFLRLGIPSALMVCLEWWSFELLVLLSGLLPNPKLETSVLSISLNTGSLAFMIPFGLSAAISTRVSNELGAGRPHAAHLATRVVMVLAIVVGVLIGLAMILVRNIWGYAYSNEKEVVKYISKMMPILAVSFLFDCVQCVLSGVARGCGWQKIGACVNLGAYYLIGIPAAFCFAFMYHLGGMGLWLGIICALVIQMLLLLTITLCSNWEKEALKAKDRVFSTSVPADMMT

SEQ ID NO: 71588 - protein, 267 aa, Zea Mays
MEQQMVPLCVKSVKRKRKRVDHSNIILALPAIYPFPQKKTVASAAGKKRAATKKNTTGRNKTRNKAARAPKQGLRKGKRKNAKAAHAPNDDALTEGRIGSVDISNGASNEHPVQEDQKDLIRQQHNFSNTGDDIIVDDRSGDANEPKIVSNEQYISDEEAGTVQLPNPAKQDILEADSAVEQPYVINNEQQIMEEQPGVENQQNVAVNQQHKPDEQAGIMQEQNIGNALEENVPEDPTVFADIFNFPLNNELMDLSNIEDNLEDSTG

SEQ ID NO: 71589 - protein, 777 aa, Zea Mays
MELDLIKQYSQVERIFADRVSKADGDDLVPEYLVKWQGLPYAESTWEKDTDIDFAQDAIDEYKAREAATSILGKTVDFQRKKSKASLRRLDDQPEWLKAGKLRDYQLEGLNFLVNGWRNDTNVILADEMGLGKTIQSVSMLGFLHNAQEINGPFLVVVPLSTLSNWAKEFRKWLPNMNVVIYVGNRASREMCQKHEFFSDKKGGRHVKFHTLITTYEVILKDKAVLSKIKWNYLMVDEAHRLKNCEASLYTTLLEFSTKNKLLITGTPLQNSVEELWALLHFLDPVKFNSKDSFVERYKNLSSFNETELANLHKELRPHILRRVIKDVEKSLPPKIERILRVEMSPLQKQYYKWILERNFQNLNKGVRGNQVSLLNIVVELKKCCNHPFLFESADHGYGGDSIGDRNKVERIVMSSGKLVLLDKLLVRLRETNHRVLIFSQMVKMLDILAEYLSLRGFQFQRLDGSTRADLRHQAMEHFNAPGSDDFCFLLSTRAGGLGINLATADTVIIFDSDWNPQNDLQVLPLILFLLQVLDHLVIQKLNAEGRLEKKESKKGGSIFDKNELSAILRFGAEELFKEDKTDEEAKRNLESLDIDEILERAEKVETKGGEGEEGNELLSAFKACDVANFSSGEDDATFWSRLIQPDPADIIQETLAPRAARNKKSYVEDPQFDKNNNRKRRAVEAQEKPRRRSGRTVETVNSVPLVDGAVAQVREWSFGNIPKKDASRFVRAVKKFGNATQIDLIVDDVGGVLEKAPHEAQIELFDLLIDGCQKSC

SEQ ID NO: 71590 - protein, 61 aa, Zea Mays
MLLEVIILSSSHGLELSIISSAYALEISMLSSFPVLETNSMICPCPVRFEIYLISDILDVW

SEQ ID NO: 71591 - protein, 534 aa, Zea Mays
MTFSMDMDLNASPVPDDDEQQPYNEPVEAEYAQEEHVESAVATLRREREERRKRLKREQQDDGSRLHSQQIRVDYAPQPKRHSRIKEAPQGWLDCPAFGEPIDKIIPSKVPLDETFNESVPPGKRYSSKQLVNKQRKAGREIGLVIDLTNTTRYYSPAEWTKQGTKYAKIACKGRDAVPDNESVNKFVYEAMIFLDRQKHSKNPKYILVHCTHGHNRTGFMIIHYLMRTHVSCVAEAINMFAQRRPPGIYKRDYIEALYSFYHEVPENMMIACPPTPEWKRPDDLDLNGEAKQDDDDDNGDPEPPRNESEDKIITNDDVLGDEVPYDQQEALRVLCYKLLEMPLIRGHSQFPGSHPVSLNSENLQLLRQRYYYATWKADGTRYMMLIMRDGCFLIDRNFCFRRVQMRFPHKSLEGLHDMTLIDGEMIIDTVPDSGLKRRYLAYDLMALGAVSKTKLPFSERWKMLEDEIIRPRYYEKNKFESGSKSNPLYKYDMELFSVRRKDFWLLSTVKKVLKVFIPSLCHDADGLIFQPAT

SEQ ID NO: 71592 - protein, 703 aa, Zea Mays
MHEHMDGVVAWSGSFFFCVNKQMNSHLRLHTAAAAAAAAVSELELLVPRGRGAGAMDQLRPEPAAGAHEIEKTAAPDVESEPAAAVPEPERVPPWREQVTARGMVAALLIGFVYTVIVMKLSLTTGLTPTMNVSAALLAFLALRGWTRALGRLGIACRPFTRQENTVVQTCVVACYTIGFGGGFGSFLLGLDKKTYELSGVSTPGNVPGSYREPAIGWMTGFLLAVSFVGLLTLLPLRKVLVIDYKLTYPSGTATAVLINGFHTPQGDKNAKIQVRGFLKYFGISFLWSFFQWFYTAGDHCGFAQFPTFGLQAFNQTFSFDFSLTYVGAGMICSHLVNLSLLFGAVVSWGVMWPLIGKQKGNWYPADASQNSMTGIYGYKAFLCIALLVGDGLYNFVKVIAITVKNIRERSRRKNLNRVADADTMALDDMQRDEVFNRDNIPTWLSYAGYAALSLIAVIAIPIMFREVRWYYVVVAYALAPALGFCNAYGTGLTDMNMGYNYGKVALFVLAAWAGKDSGVVAGLVGCGLVKQLVLVSADLMHDFKTGHLTLTSPRSMAFDVGEPDGYWKAPYALIYRNMAILGVEGFSALPRHCLQLCAGFFAFAVLANLARDLLPRRLARLVPLPMAMAVPFLVGASFAVDMCVGSLVVFAWHKLDGKKAALLVPAVASGLICGDGIWTFPSSLLALAKVKPPICMKFTPGS

SEQ ID NO: 71593 - protein, 379 aa, Zea Mays
MASSTSLSLCLHASSPSSSSPGLRRPSLASSSSSRSERTRKIRAKAVREDWRQKSKPIPPGAVYPAKDHCSRCGLCDTYYVAHVKTACAFLGDGMSRVEDLERQVHGRGRKEGMDEMYFGVYDQLLYARKTEPVEGAQWTGIVTTIAVEMLKANMVDAVVCVQSDPDDRLAPRPVLARTPDEVIAAKGVKPTLSPNLNTLALVEAAGVKRLLFCGVGCQVQALRSVEKYLGLEKLYVLGTNCVDNGTREGLDKFLKAASSEPETVMHYEFMQDYKVHLKHLDGHIEEVPYFCLPANDLVDVIAPSCYSCFDYTNGLADLVVGYMGVPKYAGVSMTQHPQYITVRNDRGQEMLNLVAGLLESTPTISRLQATVCYGDSES

SEQ ID NO: 71594 - protein, 375 aa, Zea Mays
MRGFRFALVRAARSRSRAEHQTVQRRRPSDVAQRFSHTAPAPARPSFGIAFDIDGVILRGRSPIGGAPRAIRRLYSEEGGGVPEHRRALELSQLLGVNISPTQVVHGHSPYRELVKRFEDDLIVAVGKGEPAVVMSAYGFRKVLSIDEYASYYKDIDPLAPFKTWKVGQTDSHMSAKVHPSYDVYSERVKGVFVVSDPVDWGRDLQVLCDILSTHGLPGTEKGDQPPLYFAADDLEYQAAFPSERLGMGAFRIALESIFNEINDHPLKYTSYGKPNPFVFKNAANILEKLVMSMYPNSQTPMEGKDYQFSTIYMVGDNPKVDINGAMKAGHPWSSVLTRTGVFRGKDNDPQFPADVVVDTVEDAINYILEKERIQ

SEQ ID NO: 71595 - protein, 63 aa, Zea Mays
MTASEERAGARVRARCRLYVDGELLPQRLFHPQDVVEAVELKAAQHEPVAEWSREAGQRWPAP

SEQ ID NO: 71596 - protein, 272 aa, Zea Mays
MLLSKVLWKIPDRAISHDTSPLTIYATSSISNNVKTVLGSGTQYANGFAVADIERSSLILCGKAFANSAIVKDALAAMTAPILSARGGLPVPGWIMSFGGSIVLLFALVEIMMSCTEIHNALLSIDCGAVISSKGSTVLFPTKASREQKLLTEPTGVIIVSSDSSGVIPSVCKLSPGQAAYHFLAGYHDGKFVPAYTRAPSPADPLALAISLFSHLKEDDTPAYLINAKHSGKYIGGNGLMKLLKLALSHDLPNKKTEGSRVQALQREVCSV

SEQ ID NO: 71597 - protein, 329 aa, Zea Mays
MFGFLKQRRQTPSGFSSSSAAEEVTAGIDGSGLVAIVTGASSGIGAETCRVLALRGVRVVMGVRTPSAGERVKEEIVKNVPAADSPHSQILRKAGQKKAEPNRHVSSMSSVKRFADNFNGLNLPLNILINNAGIAFSPFTLSDDGIELQFATNYLGHFLLTNLLLEKMKITAMESGIEGRVVIVASDSYKHTYREGIRFDKLNDASGYKGILAYGQSKLANILRSNELSCRLKEEDAKVVVNSLHPGVVATNITRHLGIIKDILSPIAKLVLRGVEQGAATVCYLALHPQVAGVTGKYFVDFNAVELKPPATDKELSKKLWDFSVSLLQ

SEQ ID NO: 71598 - protein, 278 aa, Zea Mays
MPPHRAQNGWSPDAWNKIVSKFHKKHEYVTFNKIQIQEKERELKREYKILKEARKQSGVSWNEKRCMIIAEPTIWDNIITTFPRAKKFRNKSFPIFDALGELYDGHIAQGTWNITSTQPLQNSDDGEKFKTIEVEYEDTNEPQVDARIEQDEDIVIVERVEHRLPKRSGAPTVNQEKETKRVRKDALEGLIGRYLDVKTKQVADEATQSTKEKEVAQDNDFSIKRCISVLKTMDITRDEKIKAAEVFNTPNYRETFICFNDDEPEVALLWPRGKMDKL

SEQ ID NO: 71599 - protein, 140 aa, Zea Mays
MEGSSNSCPRSVGLLVRRIGGSVGAVVRSNDRAQIMCAARVLVRPWRDASRARVMSVGRSPVATTPPPCAGIASSPSCSMLVSIPGCPVSVGLCLGSHDFHGTLLGSSTWLDSKDVVQVVARRERQDRDRHLNVIYARTW

SEQ ID NO: 71600 - protein, 321 aa, Zea Mays
MVRAQIRSKVQEVEGGIMSLLRSCLESEAGSSKSMISGYIDHHQSLSSEDKGWGCGWRNIQMLSSHLLKQRQEAREVLFGGSGFVPDIPSLQRWLEIAWDKKFDTIGSSHFHNKVYGAKKWIGTTECATLFRSFGLRAKIVDFDSTESSDLQSKNSSHAASQVRGLMDKFLIKSNSPKSSSEFCQEDAESMRGQHALVDWVWNYFACERSDRLTTQRATVSNKTPLYFQHQGHSRTIVGIQKEMVHRGSQEQYTLLILDPGHRTADLERSLRSKNGWQRLVKRGVHTLRKPQYQLCYVDPGIASSEEMEQLKTIDSMLVRF

SEQ ID NO: 71601 - protein, 259 aa, Zea Mays
MAAPPQLASLKHAALLPARPWKPHRRPRLNPLCRVPLPDFRASVMVYGGMGLRYMYPCITMGRSPGPLVPSVSSTAHTLSSPSRPNSPPAVLACTAHGRYAFAPAQSIWSSGTTNGGMKQPASLAQIRGALDVRPSHPRSPFGFPLFASVSMSKRTRLGQQWCRVPSVHAARFHHSRRAQDRFVCVSFSWLSSRRWSLLPIVPSSPLSCVATGLLSDAAVSVTCFSSLALQLFTPPSCIVVDPTIERRAWRHHHPCPLI

SEQ ID NO: 71602 - protein, 274 aa, Zea Mays
MSAAATKVKRRVGKYELGRTIGEGTFAKVRFAKNTETGEPVAVKILDKEKVLRHKMAEQIKREISTMKLIKHPNVVRIYEVMGSKTKVYIVLEYVTGGELFDTIANQGRMREGEARSYFQQLINAVDYCHSRGVYHRDLKPENLLLDSYGNLNVSDFGLSALSQQIKDDGLLHTTCGTPNYVAPEVLEDQGYDGAMADLWSCGVILFVLLAGYLPFEDSNLMTLYKKISNAEYTFPPWTSFPAKRLLTRILDPNPMTVCKSTEAARNKILPKTM

SEQ ID NO: 71603 - protein, 66 aa, Zea Mays
MNQIECASCALLCLCREQTLMLLPSQAALTHLINVINMWQATHHVPAGNLLECLEADMPEALMPAP

SEQ ID NO: 71604 - protein, 112 aa, Zea Mays
MALFVKKFNKFMKMKRGQPRRGHTSRRHAFNDRKCFECGEPGHIAMNCPNKKKKGTDGDDKKKKKFYNKKKDGKAYLVEWDLDNSSDDDDDDTSSKLNAGMAINEAPSLFSS

SEQ ID NO: 71605 - protein, 733 aa, Zea Mays
MTCASSPPPPPRAMKRELAFALQSLSEISASPGRTRSGRPISSLPNPLASASPKRRKRSAPLGLASAADLISPPTPPIDAEPPNQPLRDIIQPLHGSNPPTASDHRSDSNADQELIPQTMLEAPQPSHLETAIGCATATEVSAVKVIANPNLPASENSAADDSAMEVIAKPNVATEDGASKLNVAMEDTASKLTVADTAAVEPTLLETTIAAGSTVVAGNEQCDNSNSSGASLQQQAVDNVLMSTAMLAEDAATPVAAAELKPARRFTRLLLKNHEPDKEESAACESQATPDGSKDTSFDFALLLEKPQRRFTRSSLKTKVESSLVGSDDALDSASDARPSVKKMEMKMSKKVACLTKHPGNIRELLNTGLLEGMPKAVLKGVITGCNIRCFCLSCNGSKAVSSYYFEQHAGSTKKHPADYIYLGNGNSLRDVLRASDRSPLEALEKTIRSSIDPVVKRSHTNCLNCNEPVLPSSQTENVLCQVCLESKQPQDPLTTSYTCNGSSSLTPSSKEALLKNISSGKKGGSAGKVTNKDNRLHKLVFNVLLDGTEVAYYVDGQRKVDGYIKDQRIYCNHCNKVVSPSAFEAHAGEGSRRKPYDNIFTSNGVSLHELAMKISKDMELSERETDDLCRECGQGGDIFPCKICPRSFHPACVGLSKVPSEWYCDNCRNLVQKEKALAENKNAKAAGRQAGVDSIEQIMKRAIRIVPISDDLGGCALCKKISTMLCLMSAL

SEQ ID NO: 71606 - protein, 56 aa, Zea Mays
MPKAASVDLAKSKTEKDKAKKPNIEETKALEILSPSSEVTVPKAQKSSAATPKRRR

SEQ ID NO: 71607 - protein, 340 aa, Zea Mays
MAGLGFPRSKEAARSHAVSFLLGAALPTALLFFLASDRLGDGLSTISHSWGNGPAGDDEANQHAMFKGLAELLPRVAMDDRTVIITSVNEAWARPGSLLDLYLDSFRNGQDTAHLLGHLLVVALDARGFRRCQAVHPHCYLLLNVTSSVDMSSAKPFMSTDYLELVWTKLVFQQRVLELGYNFLFTHFPVYADMSCSSDDFKPSRAPLDNPLNTGLYYIKSTHRSVEMIKYWRAARERFPGQHDQAVFVNIRHELVTKLQVRIPAAGHGVLWRDLRVPRRPREGLHHPRRLLRWAGHQGARPQGLCRGLEELHQPGAGGEAEGCFQVDLPDSVPGFHRLA

SEQ ID NO: 71608 - protein, 58 aa, Zea Mays
MFVSMLHRYLLVRWCWGRIKGAIEHMHRLLQMVDQSLRYLKFHRIGTMQLLKHLILMT

SEQ ID NO: 71609 - protein, 134 aa, Zea Mays
MQAFPQYLATPTPALTALVPSKFGAPRLPHPTTLWGSSVNFTLGASSSTGVSGAYVLPFTDGREQGDVVTGTVSVNSFDSHALFDSGASFSFVSENFVSRAGISVQRMGHPIVVSSANGSISSCSVYPGCSVIL

SEQ ID NO: 71610 - protein, 659 aa, Zea Mays
MGTLPYLLLVVLSSLSLVPRAAAYSEYSCNGTTGNFTAASAFGANLARLVAALPANASSSPSLFASAAVGAAPDTAYGLALCRGDVTDAGVCSACLADAFGRLRRLCGADRDATFYADLCTARYSGGDFLARPDDNSPVINALDVNGSTYYGWDARNATSRTLFLSLVGTLFGEMAMYAAYNSSAARMFASAAMYVNPQLPTVYGFVQCTPDLSRAQCWDCFQVLQDQNRRWYDGREGGRILGVRCSFRYEAYHFFGGMPEVRIGLKGDPSSPAAETEIHEKKRKLQLEAQSRNSSTTEDALKLWRIEESSSEFTLYDFAELAAATGGFSDENLLGRGGFGPVYKGKLPDGAEIAVKRLAAHSGQGLEEFKNEIQLIAKLQHTNLVRLVGCCVQEEEKLLVYEYMPNRSLNCFIFDQQRGPLLDWEKRRRIIEGVAQGLLYLHKHSRVRIIHRDLKASNILLDKDLNPKISDFGMARIFGSNMTEANTNRVVGTYGYMAPEYASEGIFSVKSDVYSFGVLLLEIVSGKRNTGHHNYGDFVNLLGYAWQLWRDGRVFELIDPTLGERGDVATIVRCVKVALLCVQESATDRPTMADVTAMLATAGDAASAGPLPDPKRPPHFSLRVATTSGSDDDCGSRTRFTTSCSTNDLTITSIHEGR

SEQ ID NO: 71611 - protein, 121 aa, Zea Mays
MYRFVKPATGISVHWKISTDERFFPYFQNCIGAIDGTHVPITISAEKQAPYRNRKGTLSQNVMLVCDFDLNFTFISSGWEGLATDARVLRSVLLAGFHVPEGNIILSMEDMLTHHLSAFRD

SEQ ID NO: 71612 - protein, 143 aa, Zea Mays
MPLTHLNATSVVDAIVDIRGGYSPPLTTLFYVVVLVPAGGVRASSVRVRGVHCRIEWITSSGEGELLVVAPWVPRIHQAQCVGLIVAGTTVSNPSKMSYCYPLPITAFKSEFGHSNRSLGGRGHGLRRGSRAAAPGSRSLGDA

SEQ ID NO: 71613 - protein, 68 aa, Zea Mays
MVLFKRQIQEVYHESGVRGFWKGLIPTLIMVCNPSIQFMIYETLAKRLQSKRSGKQLPKRHLTAMGFF

SEQ ID NO: 71614 - protein, 549 aa, Zea Mays
MEREMADAPAAAIPAAEPLAAVAEEGEGEAAAEAVGSTLTMERVAAAKKFIESHYRSQMKNIQERKERRFRLERQLASSQVPKEQQINLMKDLERKETEYMRLKRHKICVDDFELLTIIGRGAFGEVRLCRERTSGNIYAMKKLKKSDMVVRGQVEHVRAERNLLAEVASHHCIVKLYYSFQDTEYLYLIMEYLPGGDIMTLLMREDTLTEHVARFYVAETILAIESIHKHNYIHRDIKPDNLLLDKNGHMKLSDFGLCKPIDCSKLSTLNEDEPMSDDNLRESMDIDSSLSDTANGRRWRSQHEQLQHWQMNRRKLAFSTVGTPDYIAPEVLLKKGYGMECDWWSLGAIMYEMLVGYPPFYADDPITTCRKIVHWRNHLKFPEDAKLSNEARDLISRLLCDVDHRIGSAGADQIKAHPWFRGVAWDKLYEMEAAFKPQVNDELDTQNFMKFEELMNLVSPTSLFSVAVGKSSSQNRLWTFKEEVQSSRALERTSITAVSAVCPRQISELNQHANAWMMWLQLDNLLIFSQVSAFSIVGKRFVEIHQSF

SEQ ID NO: 71615 - protein, 69 aa, Zea Mays
MSTHTRFSQDQNGSLPIESSVPHHPASYQVDTRYSRHLSIPIADWPFWYWSRGINTKRTTGSHRGSMKL

SEQ ID NO: 71616 - protein, 1324 aa, Zea Mays
MAHRGTTPIMGHVVPAHGTSQRPTTRHTITYSCSKSFHTSEVVFLPRLLPVPELLPTTVGLALGVGVNEELPQAPPPFPCAIADTEEARGLATEQEVDCPSAPWLTSREGNGTWPTNRKCVVAARTGKSRRRTGNGRGKPTREGTGRGELECENGRGGEEITGRLGGRRTDGRWRGLSIKRPDARRINSSASENRTLATLSDQTKQRRGHFSAQAVARPHPGEGQWGRRGAKSRRGRRQGGWTAPARRLPVARRPAASVAAPDISALLQQHTAAWRTAAQVQPHRHTKPHLPHQSSTRMFPWEMDIDGESSKTLGQMEDLTQSSATYTSQMLLSNLASSGIKEKIPLENESCGICRDIVIDRGVLDCCSHWFCYTCIDNWAAITNRCPLCKSEFQHITCTPVYGTIGATDEDEYSLTSCDDDWYGQEESSTLSFPSYYIDAEAVVCLDDGDCKIRNGLVAAEDDSTLDTSIACDSCDKWYHAICVAFNATMASDSSWLCPRCKFNEVEYEANVILKQNLGEDCVIGSDRTCTNASFSGRVSVSVADEGETALVVSMVGAHSETRGGLSEASLGLETAHETFNCSPYPSHSKDVLVADASSLRNTDIVSRSQNKPSEINVVHTLCSEPTETSLQFSPIREPATTIFSSEQDNMSTERLEVPKLVSSCPVVDNSKEAKSTGEENAAQQSNNELSSVIKSPQPASSDAVHQMKTAQNLQLPLRHDEHSSDDRKEEHIESGNEMIHPAKKAKLEVQEDINVIGNFDFSSIHSHTTSPAKAITDDIMSESVAQQKSIPDIMSIVDGEVYRRDPGRELAKPVGRRAGDKPGPRVKKIFRKEEGKESSALVQKLQKEIKEVVRDTGTNILEKDESFDEKLLTAFRAAIGKSVDGPAKSTNTNQLIRTRRSLLQKGKKRENLTKKLYGTSTGRRRSDWHRDWEVEFWKYRCSPGINPEKIETLQSVLQLLKKSSEMDKESAKGKREENNNSSILSRLYLADASVVPRKDDIRPLSALAGCAPLEKSSQIKASCNKSSSIPAGGNETMKISSPSSTGKASSYSILNKEAPSRRENRNSQPSQDKRNQSSGDIKQDKRKWALEILARKNASSITNKDQTGGNDALKGNFPLLAQLPVDMRPQLAAGSNKKVPVSVRQAQFHRIAEHYLQKANLDVIRRCADTELAIADAVNVEKGIYERSNSKSIYVNLCSQATRQHAKAKSDNDTSTLTKRTESGSDQISQEATSEGTNVSGSDMEEDLNRAAISNQKNELEDDTAPEHIVHKDTVSFNSAEDALRKAGLFDSPPNSPERGNTAVEGNSESTAVSNCPKFSQK

SEQ ID NO: 71617 - protein, 340 aa, Zea Mays
MDQVHVLEGLVSGDKVQKASLAEQIGSIDFQLFRHAVHCVSKQIESSSMNLLANSSLSRKKVIKIPYKTLINLGDKAEHAFSTEFKNGLDILLKSKAAIVLVRNGSDSDTEFLSLLNSFSELMKVVENKVSPPLIVIAPAGHVESVRKCLVENDYFGFDTQKVWVLEEVELPVVSICSEGNRKKVLMKSPWEIIKKPTGSGAIFSLLLSNKILETLNEMGVQYTQICSSSNKPIIGHPLLFGAVASRGADVGIQVSKTGETLDDFDVILSIDQLNKMCRDVTQIRFSARSEQNVHVEHVDGQWVAVQPEVANSHRLHAEVTSVLDSCAPDKLCVMEIVEQ

SEQ ID NO: 71618 - protein, 184 aa, Zea Mays
MPLPWLGWKNYEASIGGQRALKLIRQHGCIEEVLQNLNQTRFSVPEDWPYQEVRTLFKEPNVCAGIPDFTWTSPDPEGLMDFLSTENSFSPDRVTKAVEKIKVARDRYSPGRMKHLTPVASLRGSHTEKEPQCILGSPGQTLKVMSSPQVCKSPSSGFRYGSSKPFMLGRQSGFHGMPYALSFI

SEQ ID NO: 71619 - protein, 56 aa, Zea Mays
MPVSLLDRFFDTPCNWTVQYVPSLRMRIKKGGIKFILEHCPSCYSQVGGLLLHRRS

SEQ ID NO: 71620 - protein, 98 aa, Zea Mays
MLCSVDDDPEHEFKFQRPRKDEQGREDLLPRKVEQESKWQGAPSARYMWRRSGAMYLSFTGAAIDSATFVHPQCLGTTVVAKPAIEPGECLEIAKLST

SEQ ID NO: 71621 - protein, 95 aa, Zea Mays
MAYVERGVVKDKRTIWRLSIISDFFWAIVSFIRIFFDTLFSLDKTDNFKKGYGAGKKWDGGPGGGGRGPYGGGGGGGFGGGGGGGSLPACGSCCG

SEQ ID NO: 71622 - protein, 60 aa, Zea Mays
MLSSELSACHETVSSLKSVNDDLNAKLKEANKSSSCVEHVSICNRCKDFDINACNEHLSS

SEQ ID NO: 71623 - protein, 50 aa, Zea Mays
MGPLTDATETASRANGPHDSLAPSCHMSYYIFVSCVQPKKKQGIVLCIYT

SEQ ID NO: 71624 - protein, 72 aa, Zea Mays
MLSLRGYQGIPLSSHGEAPNWHHRQADAVLQPYRADSGKGTSRVQSGGECQERPRTDVQKCQLEEWIWDLNV

SEQ ID NO: 71625 - protein, 73 aa, Zea Mays
MMMGWLFSTDHLSATSSFSFLSISSISTSLNVPQQYASAQTLSQCSFLLPVQPLWRRDARRHRGPGSGPEKAL

SEQ ID NO: 71626 - protein, 289 aa, Zea Mays
MDASPLNPPPLVEEELVLRRSARCLNRPTRPSYAEQEPPKKPGGRGRSKRKRDEEKPELAPAQQGAKSPDRKDSKDEAGEKKPTPMIAALPVSCAGVAAEDDATGTGKSAKLRVKETLRAFNSHYLHFVQEEQKRAQAALQEINAKSGLKRQTKGGEKKRPSKRPDLKAITKMQEMNAVLYPEKTIGHLPGIDVGDHFYSRAEMVVLGIHSHWLNGIDFMGLKYQGKEYSNLTFPLATCIVMSGVYEDDLDKADEIIYTGQGGNDLLGNHRQIGSQQLKRGNLALKGEW

SEQ ID NO: 71627 - protein, 232 aa, Zea Mays
MARGGGDRSREDDPFSDGGTTGTDSDESSPRGVGARGPGSTSNPILTRLAVSRNPSPLAAATAAPGVCLLRFAWESAAGSLVGAAVGYGADLGRWGWTPCGLGKGLVTMKGIKGSFADAASSAKIFAVLAGVQSLVACSLRKLRGKDDGINAGVAGCCTGLALSFPGAPQTLIQSCLTFGTFSYIIEKLNKQQPALALPPATGVMDPKAGQSVLPPFTLPPLDAMDEFLVFW

SEQ ID NO: 71628 - protein, 69 aa, Zea Mays
MNGKVAQFFFFLFLFVLVPVLWNEFIRFVGWTANIYVRIWTPLSLSGWKGVAEGRECSEACVAALAGSD

SEQ ID NO: 71629 - protein, 103 aa, Zea Mays
MEAALEAARAKDTKERLARVERLHEALNAAACRGLTTTEVTALVRSTPTSASPRAASRRSPPPPSSAATTSRSTSTPSSRPPSNASATASSPFTTPHDSSSLL

SEQ ID NO: 71630 - protein, 61 aa, Zea Mays
MSEDYTKDGVLLLWILPQKKERCAERRRRMSYGVEAFCLRRRLQFPFNIPMTWFEIHLKTY

SEQ ID NO: 71631 - protein, 214 aa, Zea Mays
MSSMLENLTSPAHKEQLEERMARIKEDPSLKPILDEIENGGPSAMVKYWNDPEVLQKIGQAMGVNLPGDSSVSTVLSGPEETEEEGGDDDESIVHHTASVGDEEGLKKALEGGADKDEEDAEGRRALHFACGYGELKCAEILLEAGAAVDALDKNKNTPLHYAAGYGRKECVDLLLKYGAAVTLQNLDGKTPIEVAKLNSQDEVLKLLEKDAFL

SEQ ID NO: 71632 - protein, 144 aa, Zea Mays
MLHHAELKFCFLLMHMFEIFKFEFVVWLDLNSIEKIKRKGNRNFRIKEKAKTAQDALSLGLFGPVGSSRPRERPHDLSVRWDPPIGVILLFPHAPVAPSPSSSPVPHVGATRSPSRCGRTSQVIGPTCTCPCFKDLRRLCICTR

SEQ ID NO: 71633 - protein, 52 aa, Zea Mays
MGCYNPPPLKESRPDIQNERLLRVENNITLAHISGNHKTAPSKVECLRIWFL

SEQ ID NO: 71634 - protein, 201 aa, Zea Mays
MGRSFRDSLKVLEADIQHANSIASEFRREYDGASLQMRMAYCPAAHFFLFLVQWTDCNLAGALGLLRILIYKVYADGTTTMCTHERKASIREFYAVIFPSLMQLHERINEVEDRKQKAICLERYRRRDEDPKTVVSEIDDNIEEECGICMEINVKVVLPTCSHAMCIKCYRECTNGSFRNKTSRTPYMSEQDQKDAEKQTH

SEQ ID NO: 71635 - protein, 138 aa, Zea Mays
MANRSSTETESIVEPELCRSTTSKAKLDDDVEQGMANVSVRRGLLKIRQRRCGASSAYTRCNKTMGVKGLIFPGAEKGAGSSQRYSTTAITGVEQERFSEVDGERRDDERRGRRRDGELKPSEPRGYTGEEETERDCG

SEQ ID NO: 71636 - protein, 114 aa, Zea Mays
MSLVETIMVVTLATFRRSSSAPSRRRWRSSDNSRRCRWHRGPPGALPSSLLGYEALTGSLDDSRFEDYLHRLNQDCEHIVLLRQFCRTTFFQMSRGGSCFYSELVIWRRSSVEC

SEQ ID NO: 71637 - protein, 581 aa, Zea Mays
MKQSHEKSKDKKKFKDSRKSKELKDSSWSNQSLIHQDSTDEGTSETSQMLADCDDLCCKCSTSEDYFNEQEEELRHRVQLEAEERKLEEALEYQRWIEEEAKQKHLAEQCRSTHASSVIGIKFGDFSYTENENNFSQKLNGIEFDSSDAHALTSSDMSVSMLTLKMNGVCNNAQPIKPLGNFGTQNPKRSSSEPQRYSQGHSAGIEKPNFEKVGSGAIPSTDVCIEDDFDKRFQEDLDEAVRQSLGCDAYPAGTVSTSNGTEVYGTGLKNAAGEYNCFLNVIIQSLWHIRRFRDEFLKTSLLHKHVEDPCAVCALYGIFIDLSKASKGQREAVAPTSLRIALSKSYPNSKFFQEGQMNDASEVLGVIFECLHKSYTSRTVYHGVSHEKNSIGSWDCANISCITHNLFGMDVYERMNCHNCKMESRQLKYTSFFHNINASSLRTAKVVIMNDQLACDQDVGGCGTPNHIDHILSNSPHVFTVVLGWQNNKERVDDISATLAGISTEIDISIFYRGLDQGGKHTLGSVVCYYGQHYHCFAFKDGRWVMYDDQTVKVIGSWGDVLVMCEKGHLQPQVLFFEAAN

SEQ ID NO: 71638 - protein, 174 aa, Zea Mays
MVSFVATNGEPTTTATSKLVWWNLVEQMTMTPTSCTSAATLPTRTRAPPSRALYKSGSIIVLGKTDFLRPDMDPITRWTATKKSGLISYKKLLFHGLDLWTALSLPQPLGRAALWPPHRTIHQHLQLSSSSKRWSFPWSGSKMLGKHHLQQLAATPPPPHHGSCICFRISKCRI

SEQ ID NO: 71639 - protein, 112 aa, Zea Mays
MVLTDAMGNAIYAEMPSKLIEQKGSLLQLGKVYYIRRFRVANSKSQYKVLNAPLMIYLTLYSIIDLCRDPPSTFPLYVYNLTTYDDIDANGPKSKDFHVATCSKLLFGEIER

SEQ ID NO: 71640 - protein, 189 aa, Zea Mays
MKREAKRETSLGSMSSNVYDARSNMIGEIENRSTFLLAVKADVETQGEFVESLANEVRAASFVNIDDVVAFVNWLDEELSFLVDERAVLKHFDWPESKTDAIREAAFEYQDLIKLQNKWSSVSMHYSVQETCPSRYKEYGIPVDWLSDSGVVGKLANKYMKRVASELDALEGTEKEPNREFLLLQGGRV

SEQ ID NO: 71641 - protein, 279 aa, Zea Mays
MANDKDLLQVVRLLDDACKEAGFFYVKGHGIDESLMREVRNVTREFFQLPYEEKLKIKMTPQSGYRGYQRIGENITKGKPDMHEAIDCYTPIRPGKYGDLAKPMEGSNLWPKYPSNFEVLLENYIKLCRDISRKIMRGIALALGGAIDAFEGDTAGDPFWVLRLIGYPVDIPEEQRTDTGCGAHTDYGLLTLVNQDDDICALEVFVQVWTNGIYQPTLHRVVNNSQHYRVSVAFFYESNFDAAVEPVEFCREKTGGAAKYEKVVYGEHLVQKVLTNFVM

SEQ ID NO: 71642 - protein, 487 aa, Zea Mays
MPPPPPPPLGLRLRLSLLPPHPIAPSIRHAFCSPSVVSCHLSVRPLAQRRGGRPRPLCAARGEAEAEGFAWPDGSEEELRRLLELLPRELSRRVETHPELPALVEVVMDLGRPPLARFPSGDFLLSQRPISFDDLRHATSHSQVGDFGADNRAGISRTLHRISAIRNRKGVIVGLTCRVGRAVPGSANLLQDLVKDGGSLLLIGPPGVGKTTVIREIARMLADDYKKRVMIVDTSNEIGGDGDIPHPGIGNARRLQVPNQDMQHKVLIEAVENHMPQAIVIDEIGTKLEAMAASTIAQRGIQLVATAHGVTIENLIMNPSLEMLVGGIQSVTLGDEEANRRGVQKTVLERKGPSTFTCAAEIVSKKELRVHRSLEATVDALLAGKLPNFEIRKLGSKGSMQEVSVQKEQSHLGIYDATEFGSDSLRNARRSLDSAFSLDSAEGHIVRSDGADSSFNLYAYGDVLDLRVDCLASHSSAGVGRQCYFNL

SEQ ID NO: 71643 - protein, 56 aa, Zea Mays
MLGILSPCGSLASSAFRVLEQVWFGYIRKCGRKSEKNGHLMCSCKMKLFSMFWMVR

SEQ ID NO: 71644 - protein, 141 aa, Zea Mays
MPSHPRIPPPPPPPRPHAASDGFRAPVPRDLTSAPSMEGHHAPCILGLRAPSSDTMPSHPASGCLCRHYPQPPPRPINAPPSSPETPRPSVFSTPACIVIPSGTAAPVPLAYPPARQLPSSTCLTPLAMTPSIPGSSRPTA

SEQ ID NO: 71645 - protein, 72 aa, Zea Mays
MLPLVARLCLVRPSPAPCCGCYSAAPATTCRARWSRPSSCLGVMDSWPRGAPDPFFRGIKRARHGLMAERSS

SEQ ID NO: 71646 - protein, 97 aa, Zea Mays
MKTSSSDPLLDVFNEVSGDLKVATMSIGKMAQAMDREASNQEKARDEDPQQKLREKAINEVWRLEFTGSEVIKAAGVFVRMPDQMDEAARRERERSK

SEQ ID NO: 71647 - protein, 439 aa, Zea Mays
MAGAQEILGNPLQFASDQLLSQPSENALKAMLFLEFLSLLSPEKLSSTYGCIHANYFGLGIPQELSVSLATYLESHQLLLGSNFYARRHLADNSIGDAPSMAPDFAPSMSSGDDVKLPQSVTETPYAPSSSYNNENPNRPHHSKPAQKHRGVPPISLLEKHKDYVRLVLIVVLPTAAFSFIAAFLIFYCCGCNKNKVSVGEQRDDHPLLHMQLANVPGSSPDARVSASHLNKDNRSHSGVSMSRCFSCCFKRSTDATPSSEVIGGTPENNVTSDAPKPMSPPAPPPLPPPIKKAPPPPPGPPRGSKARLAQLSPVESSRSEGSSASEQTSESSEAEVNAPRTKLRPFYWDKVLANPDQSMAWHDIKFGSFHVNEDMIEELFGYSGGSRNNLKDKELPSADPASQHISLLNVKKSCNLAVVLKAMNIRGTNFQGCFLRQS

SEQ ID NO: 71648 - protein, 100 aa, Zea Mays
MLASAEGSFVSSKDKAVSDCAKIFTCSQPFFSRMVAIPLAPEKAHISPRLFKISSKASASWSIHSIGPSGLPLIKFSSLEKAPTLAKLAFNFLTHSIDLL

SEQ ID NO: 71649 - protein, 68 aa, Zea Mays
MCSGLHQTGTLFLFGNRDTGDGTNPSQARNGRPGRAANPLPAPSARSGRHNAEARISWPAWARCIGLP

SEQ ID NO: 71650 - protein, 618 aa, Zea Mays
MAYCYYPARACYLLFLIYQPVVYYLLLMAPHTIALSFSYDFSNPGDLDRANLTYLGNSIAGDGIINLTNMNDTWSTGGVAYPQPVRLWDHRTGRRASFTTNFSFAISGERTYNRADGMAFFIGSFRSAVPLDSGGGFLGLISNITPPPLSTVGVEFDTNRNIWDPQDAIDHFGIDVNNITSIVVYKSLGQDFPNPLSGTMSAGVNYDGSSKVLSVSLRLANGDVHDLETSVDLKAAGVPQYATIGFSAATGNHVESHQLLSWSFNSRDPPKFELWVIILLAVASVSFAALVAALLWIIMHRHYSRASSMKIELQVAREFSYQELSAATSNFFKDRKLGAGQFGEVYRGELPDPLMPPVAVKRLTRQMEARTRKDYVTEIMTLGRLSHRNLVKLVGWCQGGNELLLVYELVTNRSLDEHLHRSERLLAWPERYRIVLGIGSAIEYLHTGDQNPILHRDIKPSNVMLDDDFEAKLGDFGLVRQIHPGHGSSLEGTVMIGTRAYMDPVCMSTNTASTASDIYSFGVLLLEIATGLMPTEVAGPGGLLSNTLISTVREYYGRGSVLEMADRRLNGDFDEGEMERVLLVGLLCVQQDRRHRPEIRIAVNMLSNLKLPSPRIRS

SEQ ID NO: 71651 - protein, 113 aa, Zea Mays
MTCTHICCHGIAKNISCIFVFISDVTVFIIVHNKCTLRNFSFVFVTVICTSPKICLRFVVVFCMRHRTLCYPGTTEVSVTTRACVSMASTPRLLEGVERLLVCQRRDKLLEAY

SEQ ID NO: 71652 - protein, 918 aa, Zea Mays
MAAAAVAAAGSSNVEFIRARSDKREYRRVVLANALEILLISDPDTDKAAACMEVEVGSFSDPEGLEGLAHFLEHMLFYASEKYPGEHEYTKYIIEHGGSYNAYTSSETTNFFFDVNVDNFEEALDRFAQFFIKPLMSQDAVLREIKAVDSEHKKNLLSDGWRMYQLQKHFASKDHPYHKFSTGSWETLETKPKARGLDIRLELLKFYKNYSANVMHLVVYGKENLDCIQGLVERMFSDIKNTDQRSLKCPSHPLSEEHLQLLVKALPIVEGDYLRIIWPITPSIQFYKEAPCHYLSHLIGHEGEGSIFHIIKELGWAMNLMAGECSDSNEYSFFSVSMRLTDAGHERMEDIVGLIFKYLHLLKEDGVHEWIFNELAAINEMEFHYQDKVRPINYVMRTVSTMRLFPPEEWLVGAALPSKYASQRINMILNQLIPETVRIFWESKKFEGSTSSAEPWYNTPFSVENVTPSVIQEWIEKAPTEKLHLPKPNIFIPKDLSLKEVHEKVTFPTVLRKSPLSQLWYKPDMLFSTPKVHIIIDFHCPLSSHSPEAVVATELFVDLLVDYLNAYAYDAQIAGLFYSIYVTSAGFQVSLGGYNDKMRVLLNAILVQIVKFEVKPNRFSALKETSVKDYQNFNFRQPYSQASYYVSLILGDKKWPVAEKLEALSKLESDYFAKFVPHLLSKTFLECYVQGNIEPSEAKSIVEEIENTIFTTPNSLFKSMSPSEYLIKRVIMLENDLKCYYQTEGLNQKNENSSVIQYIQVHQDDAILNIKLELFSLIAKQPAFNQLRTVEQLGYITSLSLRSDYGVLALQVVIQSTVKDPSYLDVRVDEFFKMFESKIYELSDKDFKRNVKSLIDSKLEKFKNLWEESHFYWGEIEAGTLKFDRVESEVSVLLSATMRVKEIVSSIKQADCSLLVNR

SEQ ID NO: 71653 - protein, 238 aa, Zea Mays
MQATRRESGATVGLLFRGRAEWVRAAGHGEESGEARRRQKARGGATAGNRRRVACCAFRRAHSKHQQCTARQHASREEQREEGGLRYGGNGVLAVGRWGQRAGRERHHEQHELAGEQGPGEATMAPCRGSSTSSAMARLVRPLASAGRGAGGAGGKGRHGKELGGPGNNGGRTMAGERLLQGSLASVQARRWRPAPMEEEEGLLAMGGACRAAARPWEKGCPRLGQERKGRAPCRGKG

SEQ ID NO: 71654 - protein, 85 aa, Zea Mays
MRLRQSNISNEEYEDLLSFNNWILAIGNGVYNNSDNFSSDSTLIEIPKEFLIETTEDKIQALVQFTYPDLQTKYNDPDYIKKELY

SEQ ID NO: 71655 - protein, 367 aa, Zea Mays
MSPLALLQALIFILCCSPLASASSSELTLAGAACGDDQLVIFDASDGLLNLSVNGVLMQDRVFACQKLGFYFGSGCLRCSNLSDAWRSAVKQYCGEGSEKSHATLHQDVPRKLLRWSTENSSRNACERSGLNENNQDIGDSSEKQEHLLAVPGVILLCCGLMLPCFHAERKEVSRHDNATIQRNALESVSSYEGSMSSEKVPPTPHRIPPSPSRFAPSPQIARVGSVNLSIQQILRATQNFSPSFKLGEGGFGMVYRAVLPDGNVVAVKRAKKDQFAGPRDEFSNEVDLLAKIDHRNLVRLLGFTDKGNERIIITEYVPNGTLREHLDGQHGRVLDFNQRLEIAIDVAHALTYLHLYAGIEFLYNPI

SEQ ID NO: 71656 - protein, 206 aa, Zea Mays
MGARAGGGRTGPLAGARGGGDRRTGRRRPANGAAAAAGCTGVAVSGPPIFSRLRTYQYKDDIKYEEDFFVNSRGNKLFTCRWTSRKSECKALIFICHGYGAECSISMGDTAARLVHHGYVVHGIDHEGHDKSSGSKGYLSSFGDVVRDCSDHFKSVCEKQENRLKKRFLYGFSMGGTVVLQLHRKDPLYWDGAVLLAPMCKATFCN

SEQ ID NO: 71657 - protein, 311 aa, Zea Mays
MSSPAAATLHPSPTFLASGPRYRRRGHPSSKVSFRRLAPRLKVNALFGWPRGDTTARELIPPAESYTLSGSASEVGAKPREVSISVASSIMDIPAADWDACACDLDDPGNFNPFLTYAFLSSLEESGSAVKETGWLPFHIVARDENGHIIGVVPLYLKSHSRGEFVFDQSWAEAYYNYGLEYYPKLQSCVPFTPVTGQRILLRNTSYRDQVFDALVKGLMSLTTKMNVSSLHITFPSEGEFSKLKDSGLLQRIGLQYHWRNRNYKSFDEFLMDLKQPKRKNIRQERKKIPAQNLQMKRLRGDEIKTLGHLL

SEQ ID NO: 71658 - protein, 105 aa, Zea Mays
MAASSQTDACPARNFPGILPVATAPCSLKHAALLLLLALCACVLPRCPCVVCSFFFLPGRTLSAACRSSLRRARVLCFLLAVPTPPTMDRQSELGQIGSRSWRLP

SEQ ID NO: 71659 - protein, 65 aa, Zea Mays
MGRDEDDIKIVIGENDQDIEITILIDIMCLSPYSQSTYSNTWGVTTLAPLGEEQRGGGEGNGYSS

SEQ ID NO: 71660 - protein, 171 aa, Zea Mays
MTGIMKLIFNQPRGKWPEELIKVVWSHNTTVSRSTGFTPFKLLFGDEAITPEEAKAGSIRTVASAIDENDCSVDKDAIEGIRLQAMENINKYQAETIKWRDRKVWLKNIKPGHLVLRRVANPDTVGKLQLKWEGPFLVVSSSRPGSYRLKDMDGNDIPRSWNADELRRYYV

SEQ ID NO: 71661 - protein, 166 aa, Zea Mays
MAVLELQLTRGHNRQMWQQLYTGSYATFKMMEMAKNRACTQAQEQLEDTKIQAERIIGLEHQVTELQTQHQADQNCIKELEHQLTNAHSKSKVLSQQQEEIRLGAIAISEDLKETLSFISHQDQAIQELNRAHPMEFQVAQRLVNHLQQAVHMLNVAFYPTPASAD

SEQ ID NO: 71662 - protein, 58 aa, Zea Mays
MRKSDATMAKTRNMTTIAVMLATKTKTNTTMTTTCCKKSQTEVWLIIQRALRMMRTDA

SEQ ID NO: 71663 - protein, 236 aa, Zea Mays
MARYLLAPTSTSSSTFLPKDGVKNSPTSRPLRLRALGSRTSKARHIMAVASEQAAPPARYPKVAAPTTGPIPAAELLGVIEAAAKAGADVIMEAVNKPRNIHYKGVADLVTDTDKLSESVILEVVTKNFKDHLILGEEGGLVGDSLSEYLWCIDPLDGTTNFAHGYPSFSVSISVLFRGKPAASTVVEFCGGPMCWSTRTISASAGGGAYCNGQKIHVSQTDKVLDMNTMMPGRPI

SEQ ID NO: 71664 - protein, 69 aa, Zea Mays
MQMASCRFLQAERIIFSKKTQKEDLRMDYPQKSTRRSGATPIGCTFGAPRGSSCRLLRHGERVKTRPAL

SEQ ID NO: 71665 - protein, 65 aa, Zea Mays
MKLNIYSSSRRYIQILERLLELERCFIFRVPWIDDRGEAHVNIVLCSSSVMCQIHAGVVFGFTHP

SEQ ID NO: 71666 - protein, 246 aa, Zea Mays
MVAASPEKLHCGAAGSSDKEKEVAGRDDAEVMLPQLSDEPLREKAQRIQVMLTGGMSERLPDRGKKLLATLDAIHREQDRRQAQGDGARAPLGSLTSGNWNAVIVQYSDGLGFVAKPAMLPDGSVNLMLWNCVVPGKEGTDWEGGYFPVTLHFTENYPSNPPTCKFPRRFFHVNVYDSGDVCLSILGDAWAPSITVRQILIGIQELLENPNPASPAQDFAYDVFAENMPEYKRRVREQAKRYPSLV

SEQ ID NO: 71667 - protein, 138 aa, Zea Mays
MIFLPLPCYDMVLGMDWLASFSPMRVDWEQKWLAIPFQGSTMVLHGQSSGIPSCTVVELCVLNTATAPMTQSVLHPQIHDILIQFATVFEDPTELPPSRECDHTIPLIPGAQPISVKPYRYPPKLKDEIEKQVEEMLH

SEQ ID NO: 71668 - protein, 186 aa, Zea Mays
MTEGALHLGACWAYKFVTLLVPFALFSQFVNLCLLALDSSQAFWLRFEGHDFVISEDVKKIVAETKLAEEEKLLEEKTVGFVESIAKTNTEKITKEILEGLSEDTDDSDNNDVESGGEDSEDRPWRPSHAVFGKSTIKQSHLDNMRGRYFRDMSIVRADVDRAVPAPEENEVVIFRSFFKARLRFR

SEQ ID NO: 71669 - protein, 239 aa, Zea Mays
MNIHQGWLQQFGHSVGISGSKMVLHMTHNVFSFRCFAANGRGFSADSTNKRKIKSKKRRKDVALESSEVISGNPRNRDQWVPELRTESENKSGKKVMDKKFLEKVEAVRRSALEKKKAEENKDYQAIDYDAPIESDKSTIGFGTRVGIGVAVVIFGLVFAFGDFLPYGSVSPSKESAVVKQKLSQEEEEKFKNALQGFQATLSKSPNDPTALELFCAFEKKNNIDAFEGARLRGMPRAM

SEQ ID NO: 71670 - protein, 199 aa, Zea Mays
MAKDGKRKKVKSKSSTKYETSSDENNASDKEDNLRILFANLNMQQKEKLNELISAIHEKDELLDSQEDFLIKENKKHVKVKNAYALEVEKCEKLSSELSTCHDIISNLRNDNASLIAKVDSNVCDISIPNLRDDNVNLLAKIEELNVSLASLRNDNEKLITKAKELDVCNVTISNLRSENDILHAKIVELKSCKPSTYR

SEQ ID NO: 71671 - protein, 129 aa, Zea Mays
MKALEKQCMDILMPLRDGIPEKIEKQVQRLTRRQSIAPYVVPNQLGAFMNTVKRMLDVLDCQVEDILKSWATYLTISSGNTVFGEQMNSITVMLKKYKKYLQAIVDKFVSNTQAIRNMSLKRILEETRG

SEQ ID NO: 71672 - protein, 192 aa, Zea Mays
MPVPPLLSPLRLPSPAPPLHRNGAPWRRPTQLRAALRVPPPLHLGLAAARGDGVRRFVGTLGSKRARAVGAIRVSAISGDGGGGAGGTGIAAAAAATVVFAVMNRVLYKLALVPMKNYPFFLAQFATFGYVLVYFSILFIRFRAGIVTREMLALPKPQFMLIGLLEALGAASGMAAAAMLPGPSIPVLSQEI

SEQ ID NO: 71673 - protein, 252 aa, Zea Mays
MAAPPAASLVARAALPPRLRPTTASPLGPAVLGPSSRRRYLRLRRSPSLAGTAAAAASSPSVPSSFPGPGPGIGDALGDVEIYSAATGEPVLFRDLWDQDEGVSVVALLRHFGCPCCWELASVLRDTKERFDSAGVKLIAVGVGTPAKARILAERLPFPLEYLYADPDRKAYNLLGLYFGVGRTFFNPASAKVFSRFDSLKEAVKNYTIEATPDDRAGVLQQVKNCCTQGKTRAQATMHLWTMCSISAAKFL

SEQ ID NO: 71674 - protein, 586 aa, Zea Mays
MPLQGKGFMRDAEWMGRVHRFLGLTVGLIQAGMKSDERRASYRCDITYTNNSELGFDYLRDNLSRNKEQLVMRWPRPFHFAIVDEVDSVLIDEGRNPLLISGEDNRDAVRYPIAAKVAELLMEGVHYTVELKGNNIDLTEDGVAHAEIILGTDDLWDENDPWARFVMNALKAKVFYRRDVQYIVRDGKAIIINELTGRVEPKRRWSDGIHQAVEAKEGLKIQADSVIVAQITYQSLFKLYPKLSGMTGTAKTEEKEFSKMFKMPVIEVPTNLPNIRVDLPIQAFATARGKWQYVRAEVESMFQLGRPVLVGTTSVESSEYLSELLKVHKIPHNVLNARPKYAAREAEIIAQAGRKHAITISTNMAGRGTDIILGGNPKMLAKEIVEDNILPFLTHEPPNIDMEGESTSHKGLSNVELSPSSVGLLAKAAIMSKYIHKSERNEWSLSKAKSTIAESIEMGQMIGMEKLQERMTEESEMYPLCDAIGLAYLSVLRDCEVHCSFEGAAVKRLGGLHVVGTSLHESRRIDNQLRGRAGRQGDPGSTRFMVSLQDEIFQKFNLDTEWAVRLISRITNDEDIAIESNVVVKQ

SEQ ID NO: 71675 - protein, 52 aa, Zea Mays
MKLTIIKQRDGEACPITPHAPPQPRRDPTRLSNPVARWTAKSLQQPCPPENL

SEQ ID NO: 71676 - protein, 52 aa, Zea Mays
MYGNANVWKTFTDLFDYFPLTALVCTLKTGTTFFQLYLEHLFYASSSQYAES

SEQ ID NO: 71677 - protein, 67 aa, Zea Mays
MHDSHGKHRISSRADRKRACTFSLAPRVLHQQSPWALQDQIPSSPNYYMQYSSPRESCTTTLTTIKL

SEQ ID NO: 71678 - protein, 184 aa, Zea Mays
MVHPPTQDDEQVHQEEACDQGGAQDDHVMEEEAQPAPPTQVRATIHRNHPIDQILGDISKGVTTRSRLVNFCEHYSFVSSIEPFRVEEALLDPDWVLAMQEELNNFKRNEVWTLVPHPKQYVVGTKWVLRNKQDKHGVVTRNKARLVAKGYAQVAGLDFEETFAPVARLESICILLAYAAHHSF

SEQ ID NO: 71679 - protein, 241 aa, Zea Mays
MAAPPLGLACRVAGAFTTPAVAHSGFLPRHLARGLLPSKRWSGVVRMGAVVGGGKEGEEDEELRQTKEQAAARRRWEALIREQKIKTLTPREAGYTFKLTDKVLLDVRPSNERQKAWVKGSTWIPIFDVDASVDLGGLSKKVSNFVMGGWWSGSSTLSLNKNFVQQVEEKFSKDTDIMLVCQKGLRSLAACEQLYNAGFENLFWVQGGLEAAEEEDFEREGSQPFKLAAIGGISEFFGKAT

SEQ ID NO: 71680 - protein, 181 aa, Zea Mays
MARVRSTARVTREGEETEATETTPISEIMRQSGLVVTEGIIDEDILAAEAKQADIKEENADEEEEDNSILIPSKPSHLDFEKSTVSEADVPMMMKLGYFGEAERKLVRFAREETTPTPKDDEVVVFKSFFRAGLQFALNEMIEILKIFEIYRHQLTPNAIVRLSIFIWALRSQGVNTDARC

SEQ ID NO: 71681 - protein, 240 aa, Zea Mays
MLLSKALKMQQDTKDRKNKDIIEGLEDKIKKLEDSLKEKDSLLQSTEGSLVETRSQNDKLSGELDKARATLNERSERFDHETKELKAKVKAEAEKNAKLSETVKNLQDKCSGFVTRCITRLKGIFNTVGATSEEITPSTEDIPGAFEHIENEVEALDEVITGHRYFCVLVASCGTTAAFMKAGCNHARAVNKLNFNLSSLDLVDVPTEARSIGNRFITQIWAKGGCELARDETRKLLHSV

SEQ ID NO: 71682 - protein, 1032 aa, Zea Mays
MRKRRCWCRMARTWSCPMERSQWKIEDPPISRFTWTIENLSRVSTKKLYSEIFVVGGYKWRILIFPRGNNVEFLSMYLDVADSGVLPYGWTRYAQFSLSVVNQIHNKFTIRKETQHQFSARESDWGFTSFMPLGELYNHSRGYLVNDTCIVEAEVAVCKVVDYWSYDSKKETGYVGLKNQGATCYMNSLLQTLYHIPYFRKAVYHMPTTENDMPSGSIPLALQSLFYKLQYNDSSVSTKELTKSFGWDMHDSFMQHDVQELNRVLSEKLEDKMKGTVVEGTIQQLFEGHHMNYIECINVDFKSTRKESFYDLQLDVKGCQDVYASFDKYVEVEQLEGDNKYHADKHGLQDAKKGVLFIDFPPVLQLQLKRFEYDFMRDTMVKINDRYEFPLQLDLDRDDGKYLSPDADRNVRNLYTLHSVLVHSGGVHGGHYYAFIRPTLSDQWFKFDDERVTKEDAKRALEEQYGGEEETNPGLNNTPFKFTKYSNAYMLVYIRESDKDKIICNVDEKDIAEHLRIRLEKDREEKERRKKEKAEAHLYTIIKVARDDDLKTQIGKDIYFDLVDHDKVPSFRIQKQMAFAQFKEEVAKEFGIPTQFQRFWLWAKRQNHTYRPNRPLCPQDEAHTVGQLKELVNKAHNAELKLFLEVELGLDLKPLPLPDKTREDIFLLFKLYEPEKEQLRYVGRLFVKASGRPQDILPKLKMLAGFSQDDDIELYEEIKFEPNVMCEYIDNRLLFRSCQLEDGDIICFQKSSKADSADRYRFPDVPSFLTYIRNRQVVHFRSLEKPKEDDFFLEMSKIFTYDQVVEKVAEKLGVDDPSKIRLTSHNCYSQQPKPQPIKYRGVERLLDMLIHYNQTSDILYYEVLDIPLPELQALKTLKVTYHHATKDEVSVHSIRLPKNSTVGDVLNDIKTKVELSHPNAELRLLEVFYHKIYKVFAPNEKIENINDQYWTLRAEEVPDEEKNLGPFDRLIHVYHFTKDTQNQTQVQNFGEPFFMVIREDETLSSIKERIQRKLKVPDEDFSKVPDFQMFCS

SEQ ID NO: 71683 - protein, 88 aa, Zea Mays
MQLAGLLCARGGCPHAMSAARIALSAGRTTACGAAERGDRELPSRPSSSRGAGAGRARGTRELATIRERRAYGQETGFNALARAAAND

SEQ ID NO: 71684 - protein, 138 aa, Zea Mays
MVGDFGQRRRTSWSRSRRGQSLAFMWTSAKRMVARRRWLQGGWRHADDGSRSPPLLPSPSVTTPPRWRRCRRRQGGRRHRGWRRAHGGICSVQTLARDCLPSSHHPRGMLLGVLGRGSVPRVICRGRWEHWLREACSK

SEQ ID NO: 71685 - protein, 159 aa, Zea Mays
METCPSVKNILLLDSEGKRVAVKYYSDDWPTLSAKLAFEKSVFTKTQKANAGTEVEIVMFDGQIVVYKFIQDLHFFVTGGEEENELILASVLQGFSDAVERLLKNMVDKRTALENLDMILLCLDEIVDGGVISERLFCNGFNHWIQRFSNRIILKLRDE

SEQ ID NO: 71686 - protein, 1197 aa, Zea Mays
MVPNGAGECGGGCRRGKAAHAGVGAVAGFFLCLLMVWAVGGSERSGCGRVAEHHGVVRVGQFNLSRSQLQALVFLLSSTHKECMVNSGMVHDGNQVNGASFIPDIRCIRDRIYDGKQNWLKDAILQESCTAQDKYGLNSHAPAVLEDKLLQNVIQEDINSTTQCNPDECDLCAGISGVNVVQNIGSSSNRTIILCLSAFLGSIVISIVKTTHKRGIQTHKLYADEKVLQAPSTKISRKWSKRALLIGVLFGLCSSVCIFSCMYADVVARRIENLANMCDERARMLQDQFNVSMNHVHALAILVSSFHHGKDPSAIDQKTFEDFTARTTFERPLMSGVAYALKVLHNERQQFEEQHGWKIKKMEDGDQSLVHDYNLEKLEPSPVQDEYAPVIFSQETVKHIISVDMMSGKEDHDNILRSWSTGKGALTSPFKLLKSNHLGVVLTFTVYKYDLPPNATPQERIHATLGYLGASFDVPSLVDKLLEQLASKRKIVVNLYDTTNHTSPIEMYGSDFTPSGDLHISSIDFGDPTRKHEMHCRFKHEPSLPWSAIIISTAVAIIVLLVGHIIYATLNSLEKAEHDYRVMRELKGQAEAADIAKSQFLATVSHEIRTPMNGVLGMLQMLMDTELDTTQQDFVVTAQESGKVLINLINEVLDLAKIESGRIELEAVPFDVRDILDNVISLFYDKSQAKGIELAVLVSDQVPDVLIGDPWRFRQIITNLVGNSMKGHIFVQVHLVKELNRKGNNFCDVSAHNREILYDSDNSMLWNTLSGLEVADSWRSLENFTMFKNSNGETDTIRLAVRVEDTGIGITKDAQMRIFTPFMQADSSTSRTYGGTGIGLSITKRLVELMGGEIGFTSKSGVGSTFSFTAIFKENRGCPGDMKRYYSEPTPLDFQGMRALIIDGRSARAEVTMYHLRRLGIQCSLVATSESESASSALMKACTSSKNNPDMVLVDTEAWGKGSGLAFYHRFVDCQLKGAHKFSQPMPKTILLGSSISPVESDYLRLTGFGDCIRKPLRLSTIVACLRKTLGVGVTRQQSRDQSLVLQSVLTGKQILVVDDNAVNRKVAAGSLKKYGSKVTCVDSGSDAIDMLKPPHTFDACFMDVQMPEMDGFEATRLIRSIEKKINDMIMMGEISANNYGNKAHWHVPILAMTADVIQATFEKCMQCGMDGYVSKPFEEQQLYFAVAHFLETDETE

SEQ ID NO: 71687 - protein, 171 aa, Zea Mays
MHFLFNAWPHLVPNSQGAQSENDPNNTTIFVGGLDPNVTEDTLKQVFSPYGEVVHVKIPVGKRCGFVQFVTRPSAEQALLMLQGALIGAQNVRLSWGRSLSNKQAQPQQESNQWGAAAGAGGYYGGYGQGYEAYGSGYAQPQDPNMYGYGAYGGYPNYQQQPAAQQQQQQQ

SEQ ID NO: 71688 - protein, 308 aa, Zea Mays
MPPPPARPPQNNNFTGKEKQPVPVARADDDDIFVGDGVDYTVPNEEMSQSPVSDMDESPHNHQKQSNFIEPMYGPVPPSEPAQAWQQPNGYDAVQAQMAAAGYQGDWSSYVYAEQQLGYPEQYVQQSTQEYDVLADPSISQDPRFMTQADKDRGLGSVFKRDDQRLNQLREKDERERDPNFISDSYSECYPGYQEYNNEIAGSDDEDDLSKMDMGGRAKGRLHRWDFETEEEWAKYNDQKEAMPKAAFQFGVKMQDGRKTRKQNKDQKLTNDLHKINKILARKKGEKDGAEDGGHYDDDLPSSKKQRG

SEQ ID NO: 71689 - protein, 143 aa, Zea Mays
MSRQVVVRQCCQVWLVLNGKHISTSNDHLEYSENIGYGGGSSGILASIHELGEESDGYVTPRSDLVDETMDEESAEMNDSDQLVTEDETLTEQGTEESVTSEDMENFFQENADQSDEIQNFRNIADKAEKIMVQSDTNEQGLS

SEQ ID NO: 71690 - protein, 147 aa, Zea Mays
MPKVWKMSRRNVVAIDPIQVYYVEGILEQLAFVEESKRKEDWVVRNQERRAAKRNRIRDEHKYQEDEPEAQEWADELSPDELERLLNHDHGWLIANPHQFKVPSWFLNRKKYYKDGRFSQEPLWSVTTGVYLSVASTPRLPKGMERL

SEQ ID NO: 71691 - protein, 93 aa, Zea Mays
MASEGTQAVAPSATKLVLPTIGHSSLNQLIRSRRRRHKEGYNMLECRDPSSSLSGLMYQSPSPRKTFSSRTTLIMMQWSYLVSSRGSWCTTSF

SEQ ID NO: 71692 - protein, 87 aa, Zea Mays
MSLKYSFVLILGCHTNLMVPGSEIKGGKPSHTIELIQEFIHNGNRELGLGRDCIEVTIIHTKAVSAIFLANQNHKGSKVTLLVLDKT

SEQ ID NO: 71693 - protein, 2156 aa, Zea Mays
MEAAAADLIAALSSPSSFAGLYSRFAAYLQPFTPYLHSSNPNTKPPQKRATKQNKQPPPPDAATLRPLAKRFLPFLGRALHLLPPLVRACPVSGDKGGEAADELLEIYGLLLDCLEAISPCLAGKPYSVLLQRGRFICCLESRGHFARASAEAAATLDALRSALSPPTTSTKSRRGAAGVDPVLLPDPGSAGEAGTDPEVTLLAVELTVCLANCSSKGKVKEPTPYERLISLFKQLKPWLRILTNEVSRKYLPLLMNAMSRCTLFLVSESSLFNTDLVHGFCRYTMQECVGEGMIELLPAIARKICSSVDLTWGGSTQLLLHVLKTVTDSVVRLKDDLPKSVNELLVFVAYFCRFILSANRDLSVGASELLYKQGGYFSEVSSPTASMLLLYATGLYLSAQQAESEIPPYLSVGIPKDQKYLHALEKGLGTLARCPHDNTSLVTYLDSLEFISKILSQQVNTLWKDFSEGKPTHYSGNMDYVLTALHQFIDSSFTSFSCRQMSQGDNERQHEQHGTLLTVLVSAIKFSFLTKKDIQKSLGFIVCAISSKWFTLEELKFLIPSLGNIGVTLHNTGHVKEAPKALELCCQTIWAHISLFYYRLSSRTKGNDIMTDLSMDTLKDMDIILDAFSRIAKMVDALCRCGTEIETPLVIVAKSLSIMLPDGDNSEYNKCSFILIKAWVKAVHKDFRDTKVDDAPLLYPFLLKYRSPWPIKLIGLIVEQELLAYGLTEARSIEFCSKMQIRIIDVLLHKIYCTKEHFLERSRVLIRKAGALRASGVENIKNCLESLRDAISLLQKISHDSTRTNTTANNQLAIAYCLYAQCAQEDKLGGEVIFDSAEKALNLWLDMEAFDHSSSDMVLQQPSKTIVPLICFLVDLLSMKGCFELQFKLCKVMIMIWKQEKLPIEKLLSLLRTLPSALFIPQSCKHPFGRQFSFVTSVDEVSKVASSLVSGDTSNEQSTFLAGCLYYDLSEKVFSRGQLFQAFSYGNKALHLRKKLLKKKFKINSGISGNMERQHCGQDISLEVCGPTIVEIWPNSSSSVNTKDFFLTPWNVLRCYLESTLQVAMMHELIGNGAEAEVLLQTGKEISNFHGLSVFCIVFTSFLGQLYCKRQLWDEAESELNYARDLVKNDATISCKLCSLTLGISVDMQVGDLSWSLFEKKIHKQITAGLSNTLGMYQSAIDKLNSTNLEYCNGSFDRHTTGYLVCSKDCIPSKYEACNLGAEPLTSNDGLLSPCSVCMVIQVRRKNSGNAEAGPPLDAKARRSSRNSSRLAKGQNVETLAKTRTRSSKRNACMKSEKVLTELNSKNNVTGSKELAADASVCGEAECFPDGIDHSKDDLCNMFGCWSCLFIKSLNSGCIQNILQLRLDYVHRHYLVSLLLKKARALGSHSNGDCEVHSVYWKCISLLFFRSLPQDCCRTYGPYLIGLIMDRSIGDFLPLECAEILFNMSFFLLKSPLSEQSRDICCIFSSVTMADVVPWLLKAFVLSRESPSLVQEVCKLLACIFLLSTTDSSIQLPLGSHKESLSLNHWATYFHQVSVGTNLNCHYFASLQASSEEKVPKDTYKDFRNETDDNVSKFLRLSSRDIKYIEKHMTEFFQKLPDVPVLCISMLGGDYVNALLKFHCHPPFFPAWMLLSRFDSTNEPTTLLLPVDSISAEMQFEDSCTKDLGNPTRVLDKWQCPWGYGITDYVAPVFRNILEENFMSLSSATLTIDDVNADRVRWWSHRMKLNNYLANTLKDIEDSWFGPWKCLLLGHQLSDEHIETASSMIITGLDTEFEFEVNPMLIKAILGGAVSVDEVQECFLQLILYKGYFGRGGCCGKDRLKAFSSCQMDDGSMETLKRIITDASYELPQPADRDPVILVLDVNVQMLPWENLPVLRNQEIYRMPSMGSIFLALSRTNNDYKDHSSPFPVIDPFNTYYLLNPSGDLSSTQEEFVQLFRNYEWKGVAGNSPKADELVLALTNHDLFLYFGHGSGTQYISSKEVEKIDNCAAALLMGCSSGTLHCKGSYAPRGAPLSYLFAGSPAIIANLWDVSDKDIDRFSKALLNSWLHDKSLDGNNCSKCCQLTMELESMSIASKENGKARRQGTRGKKQQHINDSTKCCSCKQRRIASYISEARRACRLPLLIGASPVCYGVPTIIRKKVMTDSTTREMT

SEQ ID NO: 71694 - protein, 310 aa, Zea Mays
MRYYIYEKNMLMLWIMSGIKIFLQASFEMSHQQALAQVTAQAVHSQYNMINHADYTISFSSTTTPALVTAQHANFSGNLTSAQEKPALPSHTGNSNIESNEVSQGLKTSAPTFDKPADDGYNWRKYGQKAVKGGEYPRSYYKCTHTSCAVKKKVERSAEGHITQIIYRGQHNHQRPPKRRSKDGGGQLNEADDFHENEDTSTRSEPGSQDHSGKHEGSNDGIPGPSVSRRGEVYEQLSGSSDSEEERDDEQRAGNGCPGYTNANRRHVPTPAQRIIVQTNSEVDLLDDGYRWRKYGQKVVKGNPHPSSRW

SEQ ID NO: 71695 - protein, 304 aa, Zea Mays
MGAFMYGDVGSLVGGQGESTSVERVGSVLRHKVQFTWSNQEDNAEANTLLLPRRQLPVDLAEGNLEALSLPALGQIQSVSNELKDNKGQHEICCSKIETIKNLTSKERIEKILKSGANIVLTTKRINGLEDNPIGKLKVYVHDLLSKYNKKLLQKDPRCLNHMFHVSQKISFSCPLLSAPICKIYRWSEDSSSAIASNCIPGSMQIVIESCCASFAEGQGQKGENVEIPLLGRDRTFHNRERDILQMRTHFKVSKQPPTEALDSRLFAIRIPGSMDLHSHIRKVLRKLRLMMVLTGITFSLHTN

SEQ ID NO: 71696 - protein, 236 aa, Zea Mays
MAAVPGSSDLPTWRSRSSRSTCSPSSLVAASSSCSPWRRPPSSSSQRSLLPPAAAHPNGSLRVSLVPAWNSSYLRALRSCAPRLPTPTRRPAHLPFLCWRAPVFPWLELHLHAISHGRCVLAQLLLLPCRTALPHGAPSLLGFCQVRVAPMAPGWIPCRARFLGRRALPCKQLSSLSSLLPWLRPGICLEPAPLASCAALWSLMSIKPVCDKPASGCRIAWSSGNFLVAICARVGE

SEQ ID NO: 71697 - protein, 135 aa, Zea Mays
MAFWQTRDFLFCGICGTLLTFDSVRSASCPLCGFKRDAKEIEGKEIQYTMTAEDIRRGLKTQTEDVVGQRPVTNKACPKCDHPKAEFYNIQQMRERRRSTCVKDAAVISKTNEELSYHFYGYMALVPKKFPALTD

SEQ ID NO: 71698 - protein, 572 aa, Zea Mays
MMLSQKSLFRGRVFVAVPEEPRDGKSILSWVIDRVSDSAEIIIVHIVTSPDFESRQQILDCYLDQCSRKKVRAEKRVFLFTDIDEGLIHLINLYGVTELVIGAAADRHYRRKMKAPQSKTALSVMQKAHSHCNMWFICKGKLMFFREANYCLLTKSRSARPTCGVGNRKMDLRSLLQPNLEAKRLEYMYTKDIEIRKEIEAEISQQREETETLKKATLMLQNELDWYRYQWNKNANALQQASKQKRLLEHRISELDSVASHLGESMRASDSLVLSLKLEYSKVKRERDDAVKEARDMRMEKELTEPRAYGAMSSEFSLAELEQATQAFSSSLNIGEGGFGSVYKGLLRSTTVAIKILNTESLRAQSQFKQEVAILSRVRHPNLVTLIGASPEASALVYEFLPNGSLEDRLNCVNSTLPLSWQVRIQIIAEVCSALIFLHKHKPHPVVHGDLKPGNILLDANLVSKLSDFGISRLLLESSATGSEAHFTTQPMGTPAYMDPEFFGTGELTPQSDTYSFGITILRLLTGRAPLRLARVVQQAVSDNDLRSVLDHSAGEWPLAQAEQLARIGLRL

SEQ ID NO: 71699 - protein, 50 aa, Zea Mays
MYTHGCAARHMLVSWLVVVIHYETISMCYLSTICFCYVRFIIGASSVMVS

SEQ ID NO: 71700 - protein, 360 aa, Zea Mays
MKDSQSTTELQSPVQGTNEVQSQQPNSMAADAPAGNSGSLSVASNDNKKVSREDIELVQNLIERCLQLYMNKGEVVRTLSTRARIEPGFTTLVWQKLEEENSEFFRAYYIRLKLKRQIILFNHLLQHQYNLMKYPAPPNIPLAPIQNGIHHMPVSNLPMGYPVLQQPIMPAPGQPHMDPMACGLSSGHVVNGIPAPGGYHPMRMNSGNDMVLDNGAPEAPHAGATGSAMSSEMAVSPSSAASSNHAPFTPSDIPGMTMDVSALDSAFGCDVGNPESLQLGPDGSSRDSIRSLGQLWNFSLSDLTADLTSLGADLDVLENYTGTPFLPSDSDILLDSPDQDDIVEYFADAINGSPSDEEKP

SEQ ID NO: 71701 - protein, 60 aa, Zea Mays
MRFLEDQLPNGLDIGNTQAVLEPYHTFYILSKVFASSFYNQLPDFTELLIILLCLFDLPL

SEQ ID NO: 71702 - protein, 443 aa, Zea Mays
MVLKLWIMSKVPFRSSTGHRVLHVNGQQGHRAGGQKQPATTVGHSFLSYICMFFKGMYMDLPNTLDFCKQPKILSEKKVENGRCRGYPAPCLRQWNCMVKAGFAGDDAPRVVFPSIVGRPRHTGVMVGMGQKDAYVGDEAQSKRGILTLKYPIEHGIASNWDDMEKIWHHTFYNELRVAPEEHPVLLTEAPLNPKAKREKMTQIMFETFNTPAMYVAIQVVLSLYASGRTTGIVLDSGDGVSHTVPIYEGYTLPHAILHLDLAGRDLTDCSFALDCVCSKDIIQNLTERFYLLHNYCIALFVEYYLLGDGLLLLLAGLRTDGLQSIVGAWYQRVHLFTILRSKVLGGEGLDNHQVANYETITVDELFRKWRGGSKDECFNCGDPDHYIASCPKTKSRAEADKGDHHSGRRKGKQEYTSGEHKSKGTFDKEALKKAYLHKAKIK

SEQ ID NO: 71703 - protein, 158 aa, Zea Mays
MSRASSHPPPLPPPRRHGCPLRPSSTPMMTMNTAHSASSAARPHRWKVRHLLPRRQWKESLISSPAVLGRSTTSPPAAPQRQWKAWLVQGDSSLRRQRHQLLGGVAASLQLHIFWLALLNLCILSYLLSLTVGISRVRIVFASDGGLNWVLCVTDVLL

SEQ ID NO: 71704 - protein, 487 aa, Zea Mays
MKGGGGTTRTRKKNDDSGLLKNGDTMQTTRRRSATAAAAGEIRDAVTEDGGDAWKRHGETLLFIDVESRPAQSLTCVSRTSLHEIELSMCALFSGMIVNGACLLLSWHAETLLSLEFIHCQLYPTVMDKICMSVYLKGSQSHGIQQFSIKSSQICETKPLTISSGLFKILSSGKSLHLLSLRDIKMQSPFARMIIHTLLESSCDLHTLEISENNIAGWLSELNKCSTNLLALKSDIFMNSLSVLNLRENNLQKDDVVDLHKILIKMPNLRDLDISGNPVMDEGIRSLIPFISWSIQKENPLLRLTVENCELSSIGVIILLECLTNAKQLLDVLSIADNHLGSSVAAALARFLGSHVRALNATDIGLGTVGFQILEETLPTEVALSHINISKNRGGIRAAYFVSRLICRAPDLVSVNAAGNLLPPESLEVICNSLKQGTCNLERVDLTGNMHLSSNIFPAFLEFKKHGKPILVVPPNLSTSAPYDDDP

SEQ ID NO: 71705 - protein, 81 aa, Zea Mays
MAAVSSPTGNQAPSPSAPWCSLVAVRASVPGRGGVVAWQRRARRGSRPGHGTVRAIKLAQPRPCLAPRVTVRRAHRTLALS

SEQ ID NO: 71706 - protein, 128 aa, Zea Mays
MPSLLSKELHASFMKLRRLHKPGFVYESLICFWGSQNSCGWSWPCKSARRKPTDTQQHASVGQVGGRGRHTCDTYLQEVQNFRRQDREDGRGGHRGGRHGGGGGGEGRRRGRRRVSRQRRSQGSGLED

SEQ ID NO: 71707 - protein, 536 aa, Zea Mays
MPPPSPPASQVRTCDAGAAQSPTRGTVSEMARYFRSSNLASRVFERQLISPRPGATVNTIRQFYENLVPSYTIYDIDCPDYSFRKFTDDGKYFVAFSRNHQDLIVYRPIWLTYSCNEECDPHELPPKAKKFDSFFKQLYSIPLASGNEYICKDFFLYMECHRFGLFATSTAQSNESTATEGAIHGVPLIEKITFHLVRLEDGVILDEKAFCNDFINLAHSIGAYMYEDLLCIVSLRYQTIHILQIRDSGNLVEVRSIGAFCREDDELFLHSHVQTGYAGSFLPGIKQRLLSYIFCKTWNEVPDQTLRVQHLKKFYFHFQDYVDLIIWKFLDRHHLFVKFGSVDGGVSRSTDQNLAFFAVYNMETTDIVSLHQNSSEELYALFEQFYDHFHANPQASSHGKFISSHSNDIHALDQLRVIKNKASSSSQFVKKMMTSLPYTCQSQSPSPYFDLSLFRYDEKLISAIDRHRHCTEHPIKFISVRQNVVKFKIKPGSDSGASDSRIKRISSFLFHPFFPLALSIQQTYMQPTVLNIHFRR

SEQ ID NO: 71708 - protein, 200 aa, Zea Mays
MKPMKLFMAPSEMAGSMHWVVDKVPDQSLLNTANWKFIIPRLYWNYPNDDILLNISMASSPVIRVTSEKIEATINGDMIIDVVDNKEIVPVACISVIVSASGVVDASGNKVYGRVGLDNFSLALKWSKIGNFHMSLIQGVIRVLLNTVCMPYLNSRLGNGLILPVVHGFTLQDVYVLTSAEQLTLCSDVTFNASSMASLL

SEQ ID NO: 71709 - protein, 558 aa, Zea Mays
MEAAAATTAAALLPPARKVFILPLLLLLAASSLVPRASSDGAQYDYRAYTECKPHPEPALYNGGVLRWASKITDFRTEDEGNYSPAFVLYNMSAATAYSFSCWVKIDGPESAHVKAKILTVENAASQCVGTAIARNDCWSFLKGGFTLNSTSQTSVLYLQPFSPDQWNQHREERIQQIRKRFVNLHVSDGNGSRVVGADVAVHQITRDFPFGSAISKSILGNGPYQDWFNARFNAAVFENELKWYATEPSPGKEEYGAADQLLRFVQSNDVTARGHNIFWEDPRYTPAWVKNLTGPELRAAVAGRVQSLLSRYKGDFVHWDVSNEMLHFDFYEDRLGGNATADFFSTARRADPLATLFLNDFNVVEACDDLSSSADSYVSRLRQLADDAGVTFEGIGLEGHFAKPNVPYVRAVLDKLGTLRLPVWLTEVDVSAAFDHATQAAYLEDVLREGFAHPAVDGIVLWTAMGANATCYQMCLTDADFTNLPAGDVVDRLLGEWQTKEVLGATDDRGSFNFSAFYGEYRLSVTYLNRTADATFSLPRSDDTKHINIRLPPGPAA

SEQ ID NO: 71710 - protein, 57 aa, Zea Mays
MANAAIQLFFYFSLYPPYRCWMKANLHFLFSRPTKTSLVNLGEQHALIQNFIFIHCI

SEQ ID NO: 71711 - protein, 425 aa, Zea Mays
MHQWSYQMAYPVLFFYSMHLLKALVSRSRQQDILSACGSVVFQSFRFLKTSGFTYRGLLTGSDVTAATVELSKEEDADFMEHFSFAMDGAALSVVWTLMHDDKDMSKYAGEELELAVKEVQGNHMEKWEAINMLKYVLSSIHYPWIIKSHSLNLMLILSGEDHVEEINNHVDFTCFAHRIFETLKAIESVMIAAPMALVRKKAFAALKKVISMVPSSQRFDILHGLVNNSTSPALTAILLDLVRQEVSRESRQADNDCIEDEGFRGNGLPRWASHALELVELILRPPEGGPPCLPDHSEQDLRTGEVIGTGRRRRAAPRLYILDSFRLPSLATSPAHVISALNLLRFILIIDSRGQRSAKLFRKETLHKVHSEWLTPLRPIAEQIQLENEKDADEITKQIVCMLNLVQLVLYRCIELVEEKMKGC

SEQ ID NO: 71712 - protein, 144 aa, Zea Mays
MPDDWHETSTLLSTLEKIESWIFSRIVETIWWQVMEQCVARLDVAMFNAILHESASEIPTDPISDPIVDPKVLPIPAGDLSFGSRAQLNNSIGNWSRWLTDKLGIDHDDFEDIGDVEDERRAAAETKSFQLLNELSDHLFFSFS

SEQ ID NO: 71713 - protein, 69 aa, Zea Mays
MGKNISLILSSPSIQRAPPLLDPCCAGRDLEGGGSRGEGLPWEERTASPRGKEGGAAKCGRGGKGVAAK

SEQ ID NO: 71714 - protein, 223 aa, Zea Mays
MFGIFQSFSRTKDMTWRPDLFSDSMAASGIETGTKLYISNLDYGVSNEDIKELFSEVGHLKRFAVHYDGYGRPNGTAEVVFTRRSDAIAALKRYNNVLLDGKAMKIEVIGNDLGLPMTPRINVVGASNGRATRTVVMTPEFSQRGRGSSSRPLSNRFNNRGGFQAGRGRGQFQSWGRGRGQFQSRGRGRAQFQGRGRGRKPEKTADELDKDLESYHAEAMKTD

SEQ ID NO: 71715 - protein, 534 aa, Zea Mays
MLIRNRNNSSLESVDSLMLAKSATRIAILGISTSNLNDARRINVSVMQQRGDPLLIVGSPFGLMSPFHFFNSVSVGAVANCLPPCTARSSLLMADMHCLPGMEGAPVFDQNSCLVGLLMNPLTQKGSNIEVQLVITWDAICTEWNSKKLEEIERPPRKLPNDKNTDSKSMELRHVYNYVRVFSSTDNKTNQHCISPRSLREAISAVVLVTVGDTSWASGIVLNKRGLVLTNAHLLEPWRFGRTSPSDLQASFAGEHLNAGENKSLQPQQGKISNEDAVKHKVSSFNLGFKRGKRISVRLDHEERQIWCNASVVFISKGPLDVALLQIEKVPVELNTIRPEFVCPTAGSPVYVVGHGLFGPRSGLHSSLYSGVVSKVVQIPANQLSHLARAEADNMDIPVMLQTTAAVHPGASGGVLVNTHGLMVGIITSNAKHGGGSTIPHLNFSIPCKLLVAVFEYSANGNLVVLEQLDKPNEVLSSVWALAPSSSPFVRSSPEKGKEEKVLEFSKFLSDKQQALKSNVDLKELFRYKTPSKI

SEQ ID NO: 71716 - protein, 549 aa, Zea Mays
MTTPRRHADPSPSPSPSSPPQLLSRLRSGASSFLARQYSTGKGGDNTGPSKPKGGGSSAPRHLRPGFVDPSSWKHFDSRAVGIKPGAIHTDAWAVLKKLRREGFQAYLVGGCVRDLLLKRVPKDFDVITTASLEQLKKNIFRRSRIVGKRFPICLLKMRDSVIEISSFRTVANYGNRSEVVDYVAELNGSDVRDILRWKDSMRRDFTINGLFFNPMNCKIYDYVNGVRDMRKNKVCTVIPAHISFMEDPARILRGFRIAARLGFQFSSETSNAIRDFSSSINNIDKARLMMEMNYIMSYGAAAPSVRLLRKYGLLDILLPFQMKGGSSDRHLMLMKLLSNLDRLLSADRPCHSSLWLALLAFHSTLVIYPQDTLVIRAFAAVLYFGTWETTVKFLREEVGAEVPFAPETMGPSRTKLDCLKEQTSHLASLVNSSVDILTCPHDLEQSLARFSEPLQFSGVVVASNNDRKKLSAVFEGLASDLHSYDGRRGMRGIDYSSLKLGDLAEVRFVLGKVIMDTMYDKLPCESTEDEGAAADVAGGSLPPLSALF

SEQ ID NO: 71717 - protein, 66 aa, Zea Mays
MEEAEASSSSTTSGRLSPSGLVVPVETTPSSSSHSRTWGYQEEERGAEEWCRSTFTTRRLIFSDPY

SEQ ID NO: 71718 - protein, 50 aa, Zea Mays
MHISLLSSFMYDMNNGWSLLNIKTKRKSKKIYGIFNCRIKQILFVKLINF

SEQ ID NO: 71719 - protein, 73 aa, Zea Mays
MHQRFSTQLLSPNASNKVIKILKHQGGGECTEACLNNTRLVFVRRRPLDDQLLSQHSFSLPFFRCVHPHHHAE

SEQ ID NO: 71720 - protein, 73 aa, Zea Mays
MAAILHCFLPQDLPLRSKDREKEGHVELKRKRGSRRCSSPSPLEDFFGETLGMDEILVPPCNYRLLEVVDHGN

SEQ ID NO: 71721 - protein, 192 aa, Zea Mays
MVPFVRWSLRAAFVFKLILVQCDMFSGVGPLAISAAKKVKYVYANDINPNAVGYLERNMVLNKLEKKIEVFNMDARRFVSAIYSSKHVQPITQIVMNLPNDAVEFLDVFKGILCNTKSELHCVMPMIHVYGFSKAEDPEHDFHERINLTLGENIDTVEMHRVRLVAPGKWMICATFTLPQSVASAQPNYITC

SEQ ID NO: 71722 - protein, 81 aa, Zea Mays
MAQAAVWLQGFELRSLQRTWLATMVTTSTLIEQNMIQRMQHAARSCFLSPGTSELGPASWRKQLLGLGRVSATAQKNNEPG

SEQ ID NO: 71723 - protein, 65 aa, Zea Mays
MSPRAHLGVVAVFLCCAVGEHRQGNLGTSPKYLGQAQVDGKPRPGRHRIAQIPSSLHRASSQAIR

SEQ ID NO: 71724 - protein, 505 aa, Zea Mays
MGFQVAAVAPPPCARSSSALSSPSTSSRPLPAFLGGGGGCAGLARSRAPVNWGTGVMVRRPRPARTPARCALSASLDGMGGGDAEFMKRIEELAAAAGVQPAGPAGCGWPASVELSASNVGLPLSLRMLKRKKQQQQAQLHAVARPSRWDDGLLGSAGESVGRAFSSMVLIVRELQSFALQQMRDALLCDDLQGVLARVQGEMHDSFVWLFQHIFAGTPAFMVSLMLLLANFTVQSMGRSVAAAAATIPPTAPAVALVNAQRPEPSRPRFDAASVKTFSVDRMASVGGDIGGGGKTPPVAGATGDGRSDESLYRLSRVSPQQPSAPPVAEVAQDAADADEQAIWEMMLAEALKASPRTEELSDPDVLRSLVAPVEAELETEDHAEHTLTEQRYEQAVAAEPNNPLILANFAQFLYLVQNDHDRAEHYFERAVRAEPADSEALSRYATFLWKARNDLAGAEDTYQEAIAADPGNAHHAAAYAHFLWNTGVLAACTGTGAEATRRDA

SEQ ID NO: 71725 - protein, 563 aa, Zea Mays
MYSLPGATMSAAPARVISSSSSSSFVEPLLLAAASSAAANSHHQVRQRGHLVRTLAASSSSNTLLRSDFDLQEGLTTDVKRMLRQRQKKSGGGREMLVTIDNLKRLCIDHFFEEEIEGAMATGACTRLLHSDDLFDATLAFRLLREAGHDVSAKEDVLRRFIDGVSGDFKLSLNNDVRGLLGLHDMSHLDVGGEEAALLHRAKEFSSSHLASAVRYQDNPSLAEYVRQSLDHPYHLSLTQYKARHHLRYLQSLPSSCRDAAVERLAVAEFQLNKSLHQREMREIKRWWMDLGLAEEIPVVRDQVMKWYMWSMAALQGSSFSRYRVYVVDDIFDLVGTLEELSAFTEAVKICMRSCYKALHTVTNEIAEIAHKEHGSNPINRLRKAWVVLFDGFMVEARWLATDQVPTAEDYLRNGVVTSGVPLTFLHIFSMLGYDDPSTEEEEEAIIDHMPSIISCPAKILRLWDDMGSAEDEAQEGFDGSYRDFYLMENPSRSPGEAEAHMRGLIAREWVELNRECFCRRTFPSDIAQVCLNTARMVSVMYSYNKEQRLLVLEDYAAMMLVL

SEQ ID NO: 71726 - protein, 107 aa, Zea Mays
MPENGDLPRPVPRLDILWELAVVPVPVGGHDPQLEQIRGVQASLDEGAGTLEPIRRDIGQEWAGQPPAGEMRHLPQGFQHRIADDVRVRPPPTSSGVGQNLAAAAML

SEQ ID NO: 71727 - protein, 175 aa, Zea Mays
MSIGDVCPNESEEPPHAQDQPSSSTQASTPTQDEDKTQNDEGDQEVEPPQEESNDQVGDVHDQDEEDEQVPRPPHPRVHQAIQRDHPVNTILGDIQKGVTTRSRVAHFCENYSFVSSIEPHRVEEALQDSDWVVAMQEELNNFTRNEVWHLVPRPNQNVVGTSGSSATSKMSMVW

SEQ ID NO: 71728 - protein, 234 aa, Zea Mays
MAPAALILYPSLVSILHCRRFPSSDGVHLPIPPWLRRACSVLPARAAASSSDPGAVESRPPLLGDDMFGRRLAAILRDNGEREFMFYHNPASCRSVLQQHPAGCRVVRRACLDISCRVPSLRAAVLPLAGHGSVLRSPRSSPLNRWSRSTRQSHLGRLLILYSPWYNTAVRSDLQTVMAFIVLWSQPDPSMHSLFVHRASRVLAFVVELLNPSSLAHDFIIARALTRFVSSSAR

SEQ ID NO: 71729 - protein, 400 aa, Zea Mays
MAGRDSLPEGSLFLGLDSSTQSLKATVLNNELTIVASEIVNFDSELPHYKTEGGVYRDPADDRHIFSPTIMWVEALDVLLEKLKPKINFGKVVAVSGSGQQHGSVYWKKGSHAVLSSLDASKSLLSQLKDAFSTMNSPLWMDSSTTKQCREIENAVGGALELAKLTGSRAYERFTGPQIRKIYQTEPDVYEDTERISLVSSFMASILVGSYASIDETDGAGMNLMDIKQRIWSKSALEATAPGLEAKLGNLAPAYSAAGRIAPYFVERFQFDKNCLVIQWSGDNPNSLAGLTLNTPGDLAISLGTSDTVFGITTEAKPSLEGHVFPNPVEPNGYMVMLCYKNGSLTREGGKIGFYYKDHEILPPLPVGFHRYTVENLNDVSSDALLEREVEELDPPSEVC

SEQ ID NO: 71730 - protein, 161 aa, Zea Mays
MILILQVITGKRVVSFHCHEDSLNIAGLCWRNWEAWTLSTDPVHIPVCDVSIAQGRGGRNMASTGQLKIATARPALSQTGATRMGGKARGRYRSRTAAARMGGKAQGRYREGGRSGGRARERDGWESAGAVQGGREIVREGAGTKWLGERGGGIWRFGETQ

SEQ ID NO: 71731 - protein, 100 aa, Zea Mays
MMSLHGMSCCLISSTQKHHSRNCHCQNAGWLQDYMNSSIRSAEAMISFSSEMLLEKYMITSGGILLIGILKLAKHGFTTRVTRSLLLQPRVFWCMCLKTY

SEQ ID NO: 71732 - protein, 146 aa, Zea Mays
MEGSLQPLPSPPQSMDAPAPRRAHLESRSLTLLPGPHPSRSPPHPGAPTTPLHGAQVHLLVPPPASLFHFCCLLTGKSSVGSLCYVGDESARALSVGEELMAKRPCRWVYRIDGLPYLCGTKSRSVGGQALLVFNLLSCFSSCLFR

SEQ ID NO: 71733 - protein, 331 aa, Zea Mays
MEARAASVPDLSLHISLPSSAASPSPAPGLGAGGVGRGAQPSGGDPWRRLNGSTASTELSLSPPPPRQEAAAGDVLPWRLRPPAANYSSSTAEATFLPVTVPRLSFDAAAEAAPARPINGVPVYSSPRTGAAHPFLGAGGEYRQCHHHKAAVGLYNPYHSSSSWPSSLRSTTTAPLGAVAPPASDPTASSYLSPSAYHRMLSSTGRLHLQGVLADTLRGYGSGHHHRQHLGSLAAARYMPRLPASRRGMRAPRMRWTSSLHARFVHAVELLGGHEQICLDHFMRDVINLPLHGRRPASLRAHNRGDAQVGAGADGREGSDASACEESFADV

SEQ ID NO: 71734 - protein, 356 aa, Zea Mays
MNQCVPSWDLVDDPTAAVAGGGGGLNHQVSTTGGAHRGLLLQASAGGAGGGGAFAPVVVPMSNQYYEVAELTWEKGNISSHGLLNRPAHNKYPPAAAPSSAQLHAIAGGGGRGGGSPSGDRETLEAVVGEAAARSHFLSQPAPPWLIGADAVARAAADALVPCAARAGESAADGGEAGASRRKRPRVVGDDSLVVCASQGSTAPRRRGESALLTQLDACGTEADDVCGFRTTTTNNSTSMDRDDKGSPDTENTSIGGGASDSRCFSRRSQRDGLCDDDEENVVINGDDGAMRSSISTKRSRAAATHNESERSSERNRQRFRSIPAIETTTAIAVVDCGLQIRCNTTPNEGTGSTRR

SEQ ID NO: 71735 - protein, 310 aa, Zea Mays
MFQLLDTGFVGLIFSCFSEDAQKVGKIQVTAFQSEGGQQHALPLAIAPVIDLDSSLSSSDNALTSHSALVEGMEQDTGDSRASKHNKAWKRSLDFYSHPDTNHSTNYQPNENTLALYNPDNTQEAPVDPYDSDMTQSLQEALHRSTMDISGAEYRGKEVPLFVLPTRYLLKLDTTMTSYCDMQRVLFEEEQSAYNQAMQQNICDGKIHPLTSIHCTSTYNSSLCKLMEYCLSPAVITLQDRLKENELRLSMLKEECKQLEADTQGMRNGSPRRLMNHGAGGSGSPMAQSRHPFSSQGSPRSPSGGSRRRA

SEQ ID NO: 71736 - protein, 85 aa, Zea Mays
MQGLQIMVHFGAPWMHGEFGEMGLIQDSLPEILIFRNYQSAFKPQYTLSILAETFILLGLLMEVLLDNLYSLVTELGHDDLVLQS

SEQ ID NO: 71737 - protein, 192 aa, Zea Mays
MEHTKSGPSSWPELADVVPVPQDDGPSPVVSIAYRDDFREVMDYFRALYLTGERSPRALRLTAEAIELNPGNYTVWHFRRLILESLDFDLLEEMKFVEKIAECNPKNYQIWHHKRWLAEKLGPGIANKEHEFTMKILAIDAKNYHAWSHRQWVLQALGGWETELEYCDHLLKEDVFNNSAWNQGSAIKLALK

SEQ ID NO: 71738 - protein, 236 aa, Zea Mays
MDGGAGAGAGRRNVSSSSGSRRRVLPAENGHGHDAPPPSRRSSVSLSRGHSTSLTGERTVKRLRLSKALTIPDHTTVHEACRRMASRRVDAVLLTDSNALLCGILTDKDITTRVIARELKMEETPVSKVMTRNPVFVLADTLAVEALQKMVQGKFRHLPVVENGEVIAILDIAKCLYDAIARMERAAEKGKAIAAAVEGVEKHWGAAVPGPNNFIETLRERMFRPSLSTIISENPK

SEQ ID NO: 71739 - protein, 107 aa, Zea Mays
MLGSLVARLSISRSSRPMPQQHRGRPSSRCCYLPCYCNHASCAARLKYSSQVSILCDSSPVRQDFSVNERFQEYVDKQAPGRCPKCSAKGLSKDHRRLFGLLVDMVR

SEQ ID NO: 71740 - protein, 152 aa, Zea Mays
MDPQQPEPVSYLCGDCGAENTLKPTDVIQCREWGYRILYKKRTHRKRRQAEANRIREKYPDRIPVIVEKAERSDIPDIDKKKYLVPADLTVGQFVYVVRKRIKLSAEKAIFIFVKNTLPPTAALMSAIYEENKDEDGFLYMTYSGENTFGLL

SEQ ID NO: 71741 - protein, 917 aa, Zea Mays
MASRPPLRTTSVASVSSSTESPTSTGPPGGVPQSITALLNNPLPSAAASSYSWLSWPPPTITLPDAAPPPPSHPCEVTRADFAPYLAAVSDPFARFADIRLHASAELAAASDAEGAPAVSSGLAACLREVPALFFKEDFALEDGPTFQVACPLDDEALQERLGQHLDVVEAHLVREIALRSESFYEAQGRLRGLDGEIVTTVGRIRELREVVRVLTGDLVGAARQVQELNATRGNLVTLQQKLTVILYVSQALTALKLLVAAADCAGALDVIDNLQNLLDTDELAGLYCFWHIRDQLGTSLDSVNSILSAEFVHAAVPDGKAVDVMILSTVKRKASSPLNGTDHEDKLPAVLRIYRDTLITVMKASIKTTVGELLPVLTARPIDSDSVTGDRATDADAGGQSLANKLRSLSSEGFVQLLSAIFRIVQVHLQQAAEVKRIVEWVMGNLDGTLGVDASNPTLQHGGTVIPDTQENDSSRGSNTLTRSTSKIPFVQGKTNDFSIINSLKNVRADVLRENTEAVFAACDAAHGRWAKLLGVRSALHPRLRLQEFLIIYNITEEFIAATEKIGGRLGYNIRGILHQQSKQFVDYQHNVRMTKIKAVLDQETWVAVDVPEEFQAIVLSLSSTYSSVNGMEMPSTDDNSKFSDHRSTSQEPTYSAKNIADNGKVTSGTGENKVEFTSQTENNVAGNLKSTLQTIVHGGVGYHMVNCGLILLKMLSEYVDISKCLPSLSLEVVQRVVEILKLFNTRTCQLVLGAGAMQVSGLKSITSKHLALASQIISFMHSLIPDIRRVLFLKIPEARKHLLMSELDRVAQDYKIHRDEIHNKLVQIMRERLLANLRKLPQIVEGWNGPEDNDVQPSQFAKAVTKEVTYLHRILSQTLLEVEVQTIFRQVVQIFHSHITEAFSKLEVNTPSGKE

SEQ ID NO: 71742 - protein, 335 aa, Zea Mays
MEGHHDSRFIFVILRPSHRKGLSQEFSLQDDFHDIPSSMSPDSVKQGHFDPSIFTSISLLSAESAFSSNSAINFSLNKHFSSRRAPTTTNAFGGQALGVTGLLSTFEVMRDTARDEQIMFVRISQVSFVFFHSVCCIVLIKLAKGRTKFGDSSTEALAGRYEVDGYVYSAAEEPKIMITGKWNKSLSCQPCDQEGDPLPGTELKEIWRVAPAPQNDGYQYTHFAHKINSFNTAPKKLLASDSRLRPDRYAIETGDMSKSGSEKSMLEDQFTPRWFNVTDAVASTPWGDLQICEYSGKYTEHRAAIDSSSTTDDETDVTSVQFDPWQYGGSSSSPQ

SEQ ID NO: 71743 - protein, 102 aa, Zea Mays
MWYLPVVDRLRCLFANPEDAKLMSWHASDEHKNDGKLRHPADGKQWQDFNENHRDFADEPRDVRFALSTDGMNPFAERSSKHSTWPVILTIYNLPPWLMQKR

SEQ ID NO: 71744 - protein, 303 aa, Zea Mays
MRRLKGSLRSFCMSMNQQVEVLFEDFLWANSIFWTRALNIPLPHSYVFLGSCGDQQARADNDAHQEIDITAKDCSADENSKPSNTESIWVEGLVPGIDFCNHNVKALATWEVDSVGNATGIPASMYLLLADKSPAETGAEICINYGNKGNEELLYLYGFVVDNNPDDYLMVHYPLEALRQIQSADIKMKLLEMQKGELRCLLPRSLLDNGFFGIRSSEDKDSKKNTGPFSSFSWSGQRKVPSYLPKIVFPHEFMSTLRTIAMQEHELEQVASLLGETLFSRRETTLFGDAVISVSFATSELIC

SEQ ID NO: 71745 - protein, 281 aa, Zea Mays
MARAALRLGDRALALLVLVSVALLPLVSSDDGHKHCEGVVRGWADSSTGRVKDGDKLSLKDLLFFLHIPRTGGRTYFHCFLKKLYTNAQECPRSYDKLRFDPSHPDCKLVVSHDDYSLTSKLPRERTSVVTILRNPVDRVFSTYEFSVEVAARFLVHPNLTSAKLMTTRVLKKSRAVSTLDIWPWKYLVPWMREDLFSRRDARGIDKVHSSKKVNAYDVEDMVMPLHQYINDPVAHEIIHNGATFQITGLTNNSYFDGAHEVRHCARKHPDLGRIVLEVAK

SEQ ID NO: 71746 - protein, 245 aa, Zea Mays
MRKFVFHRLCGHLRTHGLLVDSINVSIEEQVVMFMKFVGHRWTNRSVGFEFLRSGETVSRYFNAVLDALCVLSRDLITMRTTETHPKISNSSGRFHPYFEKCIGALDGTHIPAWVPIYMQDRFRGRKHYPTQNVLAAVDFGLRFTYVLAGWEGSAHDSFVLQDALSCPSGLKILEGHYFLADAGYAARPGILPPYRGVRYHLKEFQGTRRPENPKELFNLRHSSLRTTIERAFGTLKNRFKILTR

SEQ ID NO: 71747 - protein, 285 aa, Zea Mays
MRRLAQNREAARKSRLRKKLETSRMKLAQLELELQRARRQQGAYANGSMGDPALGYTGSIDPGVAAFEIEYRHWVDEQKRHTAELMSALQGQQTSELELRLLVETGLSNYEHLFRIKALAANADVFHVMSGVWKTPAERFFLWIGGFRPSEVLKILSPQLEPLAEAQRMLVGGLQHTSTQAEDALSQGMEKLQQNLAEILTAEADPFGAPDAYMLQMATAVEKLKELVNFVTQADHLRLMTLQQMHKILTTRQAARGLLALGDYFQRLRTLSSLWAARPREAAIS

SEQ ID NO: 71748 - protein, 282 aa, Zea Mays
MLYRPPRCSHCSICNNCVERFDHHCPWVGQCIGLRNYRFFYMFVFSTTLLCLYVFAFCWVYVIKIRAAEQSSVWKALLKTPASVALIIYCFLCVWFVGGLSVFHLYLMSTNQTTYENFRYRYDRRDNPYNKGVLNNFLEIFCTAIPPSKNNFRARVTAGQGLQQTRSQSRGFMSPSMGKPIGDLEMDRKPVAPWDEPRTAADIRDLEAGLGVMFDEKEGRVAHASPDLSRDLPAEFVEGRSGMHSRQSSWVQRGDAIEASAVQMANARTTEASNNVAWSGTH

SEQ ID NO: 71749 - protein, 120 aa, Zea Mays
MTAASRHKTMPEVVKNEFAIKVRDNQNDELNKKVTKVKAKAVYKDLLNSKTRTKAKPDVASDELIAKVIDHHRRGELRLLTVSDLKCFLGAKKAKVGGTKEVLIQRVTELLLDKCIAISN

SEQ ID NO: 71750 - protein, 59 aa, Zea Mays
MPPPSILPSTARPSLSPPPCLRTMLLFVQHHWSSICQPRWSSFGEPPPFLPWLAFLVRN

SEQ ID NO: 71751 - protein, 171 aa, Zea Mays
MQWWLGAESSLLPPSCILAFSASHSLAAAATGTKNPDLAADKALARDFLSNFVGPHGDPKYLSVLQDVANRKIRAVQIELDDPFHHKDVDVVFLLRVIENARRYIDIFADRGHGIGAAIHTWVLLIVLSSSRRTMRTSLSQTAVTLRRYALNKAFISSRYSRIIMSAKHPS

SEQ ID NO: 71752 - protein, 270 aa, Zea Mays
MKSWSWRRAKARPPPRGSAHGSGAPSFWGSQPGRTPAAGGGGARRRGTSCRSGRRRPTRGPAPAASRSLTTPSRTRSRRSTPSSPTPSTKKQEDQMTSGEMADGQSVKSNEEVAKKSKPSKKYKKKTNVSSPLPGEPKPEMDGSDDRNFWVPPVEGRWDDDDGKKRWELSPGKHTLAKNEDAAAGGGDNDGGDENVTAEKDDAESRELASMTKQISSWLQLKQQIRAPVSAASFQSSTKGPKSQQVESLECQQQVITRAGPEILGAQSKT

SEQ ID NO: 71753 - protein, 81 aa, Zea Mays
MSIGILICKSSSRFVKFIFHVRTHGKCTSKQCIELMLNLYFKLSYSCLKCRISESVQIWTVEPFLCFLTLICIELTWDVYK

SEQ ID NO: 71754 - protein, 213 aa, Zea Mays
MQELLDAAAARKQTGDAAPSVAKRTGMGKAAAAGSTRLQRAMEADFQGAGTAEGRQRPGTALGLKRKVAAMAAAPSVVAPPVHDFTTFCSTASSIAGSQAFSSIPNFTSGHAISSPTTPPWVRSEATDPAACQIQSEVHANRLQVLEVQQKLSSEKLETSRLNHLAALESKDAKMLEAYNSLLLKDTGGYSAEEKDEHLAALICLRKRLFPED

SEQ ID NO: 71755 - protein, 136 aa, Zea Mays
MESKLANTSLNDNNGRKTTSSSAFDRGNNSASRPPQVLEEDVIDPDNMTYELGEAIGTQSKGLPESVIALLPTSTYKTGIFSRKEKHDECVICCMAYKNRDRLTKLPCGHHYHQACVAKWLQINKVCPVCNKEVFS

SEQ ID NO: 71756 - protein, 76 aa, Zea Mays
MAAVDSPWMVSSALASGGFSLPSTVLAARALVRARPCRAPSVSLPCPCLPMVARCRPTRPSPPWLRTVFLSMLYRC

SEQ ID NO: 71757 - protein, 605 aa, Zea Mays
MAPRSSTFLSRVADAARPLSVSARPRLSPSCPSHTAAAPAFSPPAFHTHLASVASHLPSLLAALSRARAARLPLLPVTRALAASALLRHGRLPDALAHFSLLPDSDPTAPLPVPLCNSLLSALASSTGSLGHARKVFDRMLAGAVELNTVGFGVFVNAAGRKDDGLAEVLRLVDVVGCQGRRVNRSVVVAMLVDGMCREGRIEDAWRAMDEMRLRGWKPDFLAYRIVAEGFRVQGRVEEEGRILKQKRKLGVAPRKDEYRECVLVLVSNRLFREAKEIAEAVVLGDFPIDDDVLNILVGSVSEIDVDGAAMFCKFMMGKGRFPSTEMLAHLCESLCKSGKGDEMWEILRVLLDKGYCRNARGYHLVVSFLGKAGKVREAYDVLKEVKKKRLEPDISSYNSLMEALCRNDLLRPAKKLWDEMFTSGCSPNLQTYNILITKFTEMGESQEVQQLFDHMFQKGVAPDGATYTSFINMLCQENKYERALEVFNKSWMQDAGVASFVLSSFILALCKQALSVMCNVPSNVENLNSHIILLKHLTDVGEVEMAIEHLEWIRSNCSSSFENIMNEFMASLSTSASLQHVTKLIQYLHSRRLIDDAHCRLGEE

SEQ ID NO: 71758 - protein, 486 aa, Zea Mays
MADPAGLPPRLRPSTVPPPAAVTRALHAINTCTSAAALAPLRVHILREPALLRSTAVISAFFLACGRLRSLDPALVLFASLPRPHVFVFNSLLRSLPQAPACSPLPLLRHFLGLGARPNRYTFPLMLTSLSSLRELNVAHSQVAKSGFARDLHVRNALLARYAACDPDLGHAEQLFDEMPRPDVVSWTTVITAYRNHGHSFLALATFRRMFAASVAPNRVTMVSALGACAAHGAVDTGIWIHQYVQKLGWELDVVLGTALVDMYGKCGHVAEGVRVFSKMTERNVFTWNSIIGAFALVQDGEMALRWFFRMKADGIRPDAVTLICVLYACVHAGLVDIGRKIFNLIVQGEYGFQPGIKHFGCMVDLLSRSGHLNDAFRVVEAMPSQPNAVIWGLLLRGCKDHGDSVLSEHVTMQLLELEPENASHYVTLANLYAETGRWLEAHEVLKWMKEKGLAKDAGWSLRMLEDRSSKCISDGNFMEALEEIL

SEQ ID NO: 71759 - protein, 101 aa, Zea Mays
MPLIDAGTKTVLEILQVVFTTSFSTSSTAGLETLKVLSTTVLSTTNFINIINNCFENLASSIYDSRFVTFQKKGRKEDQPTFSIPFPLFFPHFSCISFGKQ

SEQ ID NO: 71760 - protein, 549 aa, Zea Mays
MGWRPHVVSVSSSALLVLLQLLVLLMLPADASSSSQLFLERTQTTTTTIYVVYMGEKKHDDPSLVVASHHATLASVLGSKDEALSSIVYSYKHGFSGFAAKLTQPQAEELKKYPGVVSVKPNTYHHVHTTRSWDFLGMSYGQQQSSSWSSSSRLLRKAKYGEDVIVGVIDSGIWPESRSFDDSGYGYGPVPKRWKGVCQTGQAFNASNCNRKVIGARWYAADVSEEDLKNEYRSPRDANGHGTHTASTIAGSPVRNASHHGGGLAAGIARGGAPRARLAIYKACHAVGGSASCGDASILAALDAAIGDGVDLVSLSLGGLGEIYQSLHAVAAGITVVLAAGNDGPVEQSLNNALPWGITVAAATMDRTFPTVVTLGDGEKLVGQSLYYHNRSAAASTSDDDDFAWRHLILFPSCDEKNLGSENITGKIVICRAPVFWSDYPPPRQLSRASRAAIAGGAKGIIFEQYSTNSLDTQVVCQGHLPCVVVDRESIFTIQSSDSTLPTVYPLPAMWPRFRRRRPWSDPRSPRRESRRSRRGAPVLSFPPYSSPT

SEQ ID NO: 71761 - protein, 83 aa, Zea Mays
MSSSQVVVLTLLEFWSVRCSSSCSASSSSRRANSESSVGLIIRITPTGTEICRRRPPDCFSWHNKPLQASVGYVITGTLWALE

SEQ ID NO: 71762 - protein, 1127 aa, Zea Mays
MAASGSGGNEPGGRPWTATSTWVLGPAGGTAEDAVSFETSDYDAEASPAGVVLCRPPADAEGDVHSCPCELTVSFRGKYEIHRVYVRSTARIYELYHSPDAKGTGKDYLCTVRCGLAVKEPQPYGEESMSQRTGSALNSAKREHEAKSVSSGSDEDSWVDVNIPESPAGNKTLTSQERNVIRTCQAHYEATAEMTDVNPCASLTIRLLSLQSNTSVHIEEIYIFADPVESTNDVSVRGPGNMGGSSLLAMLAPGLMQMSKSRNLKIDGSYFSDKSRDQDSVTCERVTQEAGLCSTNDSKYTSAGIESGMGPTIGVTVSDEKSSQSEFQFKEPNSLPLPVQTLDSTQAPSVKDRRELNTGHPLMNENFTPYNHIERKLDTLLSKVEKVELYCSRFEDSMIKPLGSIEARLQRLEEQFSSFSLDIQSLRGSSAFMSAPDGMPNTKSSQEEAPNDANDRSTSTTDRKPGLVVRAPDFMSDDSCGCNVITNGNQVSCHGPNVVPRLLVKVPDFISQAELTDGNLHDGHALSSEKECKPSPGLIVKVPEFLDDDDDDDDNDSDDEVEGKKQAEVCGDGDAHAWSDDTLKKNTSSNTKSKKTVSINGALASALEALLTSTIGPPSSKPAVCATSNLSAENINDSFSCSRYPGKSGEMPTKYGSVDQFLGTSGDPNLVGAFISFQDIDTTHNSLSKEMLDSEVEINEHNCDLNTEKVAFVAITEPLDVSSQTDKIDESICDGSWMNRQNNGSNFDTMPYIMNIEPLDPSKPPTVFGPVDSGVQVNEDRPSISLLEFLAARNANSCKNDTSEVCLGNEAAEKLSFERTSAGAGKNSKNTSQLLVKKALEIDADERFFLSSVPIGAKFERTSSPAPRTSGHDINNTKEAVSDKECGLEDRENGIRLSSRMDSIFSQCHATDSLSSLSSMESFSAAPATDPVVPGNDTSGNFVEDLAGIGDHPVATLISGEDLQKVCDLLYELKDDMLGMASTAKCTNKSSPSLEVLLAESSDSEVQISDLEEGIASGAGIGSAGLFGTFSSSDDDASAAGEPLGDVADLTTPSEPYTSAFNEPLVDVADLTNPSGTDATSVNEQPSADVVDPLHTSNEPLVSLDDLPNPPEMSFGGSSGEHPDSLI

SEQ ID NO: 71763 - protein, 345 aa, Zea Mays
MATTTAAARWSFPARLQLLTSRRFCFPASSAAPPSSVAGFSWADALRVAGDGGRGDESDLSGYFRKVKSCNRGMDKKGQFVKFSVEDQVVGYIHKGFIEHIRDFHDVFTIVMDDNGSNTVEHVSLQSSLRTPEDRTHAIGSVIKSLGELIPVTSSYGMPVYFSLERAAAPYFGIKAYGVHMNGYVEKDGQKFLWIGKRSDVKQTYPGMLDHLVAGGLPYGMSCKENIIKECEEEAGITRSISTNATSVGAVSYMDIEGFRYKRDVLFCYDLQLPADFVPNNEDGEVDSFRLVPVIHAANIIRRTDFFKPNCNLVIIDFLFRHGYINPDSRCYLDLLQSLRSGDCS

SEQ ID NO: 71764 - protein, 718 aa, Zea Mays
MDRKPAGKNSFRQQEKQKKNERLDWNDLVLAGPFVLHSHSQTAPSLYTAVSSRARGVRVPPLGGAGQKSLLDGWLRKPDASQVRRLIFTWVPMVRFHSANHLPAFSQYSLLEPMEVQLATEQPGDPFLPLRWESTGDQWWYATPIDWAAANGHYDLVRELLRLDPNLLVKLTSLRRIRRLESVWDDDARLDAAARNRAAVARRLLLDCEPDNDKQPPSRGGGGDAANRLLRAGYGGWLLYTAAAAGDERFARELLAAQPLLVFGEGEYGVTDILYAGARSGRPEVFRLLFDAVLSAAPACPVGGDDGEFRREMMNRAVHAAARGGSLAVLRDLLRGCSDAAAYRDAQGSTILHAAAAKGQVEVVKDLIASFDIANCVDDQGNTALHIAAFRGHVQVVEALITASPSLISATNEAGDTFLHMALTGFGTPEFQRLDRQTELIRQLASGAIVDISSSTIINAQNDDGKTALHLAVVCNLHSDVVKLLMSVPCIDLNICDKDGMTPLDLLRKQPRTTASEILIKQLILAGGFTSSRDHETRSAIASQLKMHSIVGSPGTSFKIPDGEIFFLHAAGVDVSGGIGEGGAAVPFSSVIARADVLHGPKLKRLNSFQDAAKHIKVLFRWPRRGWNKSGSGGRKGLDDDDASSVDSAKTWSHEETPTPLRQRYSRIGSLFNKRTYAAGRASPSEAVKKGGVVQPAGSTLLSTSLSSSSASLVDSHG

SEQ ID NO: 71765 - protein, 115 aa, Zea Mays
MDFVVHVLCAAASLCLHRSRVELRPPLSLRFPSARAASAYAAQRPSSPGLSPPRSHRAGHQLRRRHSDCIRPSEGAAALHPTPASAQPFASAVATLEKKPYHTHPTWSQVSLHLI

SEQ ID NO: 71766 - protein, 558 aa, Zea Mays
MLLLVFVAVLEVEVLRTMLIVIATWKWLLNLLQSTFVALGSRMRIAGRFKPCVHMGCFDLETFVELNQRSRKWQCPICLKNYSLENLMIDPYFNRITSLLHNCSEDVNELDVKPDGSWRVKGDAATRDLSQWHMPDGTLCDSKEDTNPGVVSVNEFKREGTSDGHRTLKLGIKKTPNGLWQVSSKPDDKKPVVRNHIQNNTGYSIPNIVPMISSPTGSCRDGEDVSVNQEGGGIQFDISLNQEFDSFAHNFGQTYNTEDRQQEPQHNAADVIVLSDSDEENDPIVRLPAVYANTPTNGDSFPFVTDAAVSGYPEGYQEDAGVGTSGLGLLSNNTGDFEINNWQMHSYPQPEQGFQFFGTDTDVGNPFVGPHNSFSITPEDYSLDCNVGIEDPSAAHDVSICRNSNDVHGSLVDNPLALAGDDPSLQIFLPSQPSTVPLQEELSERANTPNGVHPDDWRISLTLAAGGGGNEEPTSVDGLKSQPKVPSKEAGVEPLLDAASALPSMNNDRCNGSNLNPRRIENIFSHPRQPRILIFIVEGYQVILVDTKRNTSVDALLH

SEQ ID NO: 71767 - protein, 61 aa, Zea Mays
MSEETGFAPIPAVAKPPKVLGPPTDVLVLRTSDNPVDAHNHSTSSVICIIIISPKSASPNT

SEQ ID NO: 71768 - protein, 302 aa, Zea Mays
MATASVATSLPFGLLLPPRLFRGRLVRWPRQIRASASSNASNVAGGERKLGALKGRIQKNIGPNFVAGFCVGIAFLAAVARQITLRSREHDNKGSVADLVRRGQLKSGQRGTAKPRTFDDPFNNPLVKIDEGTSTVQMFGKEYRLAPVRLTKEEQEMHQKRRSRAYQWKRPTVFLREGDSLPPDVDPDTVRWIPANHPFAAASSEVDEETAKQNVYQKDGVPSRVKAEHEALQARLEASNDVTRLPPDPRSMQRNERQMELSGKPSENLQGSKFENQDRQLVIESGKHSSDGSLQSNEPEGQ

SEQ ID NO: 71769 - protein, 255 aa, Zea Mays
MDISLYAPCDLIYHQCKKICDVVRYRIHRMKKKLKDELDSRNTIQHYICPSCNKRYSAFDALQLVSYTDEYFHCETCNGELVAESDKLASEEMGDGDDNVRKRRREKLKDMQQRIEEQLKPLVAQLDRVKNIPAPEFGSLQTWERANIGAFAIGDPAAADSSRNSQGQYGTPMPYIGETKVEVDLLSDGVKEGAESGKTDSELKVLPPWMIKDGMNLTKEQRGEIIAPQKLEKSDAGDDKKHDLKDDDCFRSAQE

SEQ ID NO: 71770 - protein, 75 aa, Zea Mays
MFRSPCNNKLIKHGGRTKPEHLSHLGTPTMGKHQNVQHYNIRLQQIVPSPNTYVDQHNNGSYCGFKLHSSTPTRP

SEQ ID NO: 71771 - protein, 523 aa, Zea Mays
MEMVVAAPALPAEVERALIRDITVAADAHAKEGDTFFLITTRWWQSWIDYLIQDLTGATSNGSHHHEFGSKTPRRPGAIDNTDLIDDVPLEVSNMEIEIHDNLVEGRDYILLPQQVWEKLHGWYGGGPTLPRKAINTGFSQTDLAIEVYPLRLQLILMSRGERTFIRISKKGTVGQLHKMACKVFDLAPDEVCIWDYYGRTKHSLMDSLDKTLDDANIQMDQNILVEVTTDASGSLDGLVKRNNFFESDAPKSGLPDENFAANNYASRSYSSSLTPSIYLRSPNGDLDNVHGSSGMITRGSPLGLTGLLNLGNTCYMNSAIQCLVHTPQFTKYFCEDYHREINRQNPLGNVGELALAFGELLRKLWAPGGRAPVSPRPFKMKLSRFASQFSGYNQHDSQELLAFLLDGLHEDLNRVKHRPYINSGDADGRSDEEVADEYWANHIARNNSIIVDVCQGQYKSTLVCPVCGKVSVTFDPFMYLSLPLQFASTRSVTAVVFSCDGSVPPTPFTVNVPKQGLTIVCP

SEQ ID NO: 71772 - protein, 95 aa, Zea Mays
MASSTQRNHAFMYNDRKFSRNAHRSYYHDAINSHAMIASSSTFVHGRPRKSNVVHHVTRRVCNEPYTIYYACNTSFALLCKNEKVVARKLGSKCK

SEQ ID NO: 71773 - protein, 247 aa, Zea Mays
MGSANKINERYLKLQKSKKSTKTKLQVDQAIVWLFLHIECKNYCIYIFQVDFHYTQIRDCIVKFNRARIFNASVALGVPVHRLVKAADSVSVVTYAGGDSTYFSETLYAQARILRKTLGGGMRQVGFLCAAAYVAVRDTVGKLADDHRKAKALAEGLTKIKQFTVDSSSVETNMVSVKDEARYIFLIFHNVNRKGPAYDIPLLFISVRFVIHYQILDSDVQYALTCVESLFRKIVVALLGTEMLLMK

SEQ ID NO: 71774 - protein, 465 aa, Zea Mays
MFGCKDVHIPCSDSRTKRVLIDASCMNGCRSFWALRCGLEWAAQTGLSRDFGWATVGSATTSRGDCAATSEGGSDRWCAEHTVGMAAALRLQRQSLAASPFLFSAHGLRTASSRSSSLRSIRVTSLHVRGNWVMASAVGYNVTMSAGVDTYTKSWEAPTATGVSFYPDYNNLYTVGCGVYVYVFGDNMTDIIGSCTSICTDNREIMESANTGSGACEGLGCCSIPIRGGQGFTLKLGRLNSTIPQFGEALSNVKIIFSQNYDFVTDDVYASWVVNTSNVHGMLLNIAITDQPSCASAQSQENKDTYACSSESICDDDLSPSGFNLPYRVTNLSLDDGLLMVTNMLNDTSSNNMERVVLVNYDGYNQNGFYSTDFYSTDEDVVDVYAKMSCEGIYVTGTAASVPMASKETHTFKITVQILMSALFQINAMEYATMLMAVSIVQVALMGKSMIQKRKNVSCQLSSVF

SEQ ID NO: 71775 - protein, 150 aa, Zea Mays
MALTLKDQSILVNGDINEGKNMHTHLKAQAYLISVLRLPGSCKNEYFFKYRDPRNAAETFRANGDINGLISHCNSQIERVMEIWNKNEDFRKQYVESNKVSTLKRLGTHDGRKLGPGEDPPVIPSRRPSNIYPLSASSPEVITLASTPAP

SEQ ID NO: 71776 - protein, 500 aa, Zea Mays
MPSASGPVAVASAPAPVKSAPSLAVGISPDLYPTEDDLPYEEEILREPFKLKGWWRYLVARATAPFAKRAVIYERALKALPGSYKLWHAYLRDRLDHARPHPIDHPAYSSLNNTFERALATMHKMPRVWVLYLTSLLDQRLLTRARRAFDRALRALPVTQHDRIWPLYLRLASLPACPVETSLRVFRRYLQFDPSHAEDFINFLISANHWQEAANRLASVLNDDGFRSVKGKTRHQLWLELCEILTKHADEVAGLKVDAILRGGIRKFTDEVGKLWTSLADYYVRRGLFEKARDVFEEGVSSVVTVKEFSVVFEAYTQFEQSMLAAKLEAAEEEGAEDENEGGGRKSGMDKLSKKFLNEFWLNDEDDTDLRMARFERLLDRRPELLSSVLLRQNPHNVEEWHRRVKLFEKDPARQVATYVEAVKTVDPMKAVGKPHTLWVAFAKMYEKHSRLDSAEDIFKRATQVNYKAVDHLASIWCEWAEMELRHNNFDKAIELMSCC

SEQ ID NO: 71777 - protein, 155 aa, Zea Mays
MVACNATVRGQFAQKSEQPPEAHRTAHSTCPVRHRTVQCLKKTNLQRSNPNGWVTWLAHRTHRQQRAPTVELVVEGYKYPTTTSTPTIQAYTTVHSIQEQYTSLQRHNSSDQSAQSLKFNSSALGLVRGFFMSIVALVCLAWLSFLSRFLLSSAL

SEQ ID NO: 71778 - protein, 83 aa, Zea Mays
MRLEDSTLRKIHCLCFRYHLQTWANLCLWKLHLFELEEELKTNPLTKYVLYQMRGARIGESKLSQLVLTGSRAGRLCQKSGGA

SEQ ID NO: 71779 - protein, 321 aa, Zea Mays
MAGRGGAGRRPRAVFMAFGTQGDVFPIAEYAVVFITHSAHRSLSAHLAASSVRYMPVSSPPVLAAEQLENISSDSIQSNHERESFSMRKKAIQAEHRKECLSFVEEVFGNDPSISGDFIVINFFALEGWHLAELFQVKCVIAAPYFVPYSAPTSFKRQFKQTFPLLYKYFQEAPANTVCWTDIIHWMWALFMESWGSWRNDCLNLSPIPFTDPVTNLPLWHVREESPLLLYGFSKEIVECPGYWPFNAHACGFWFLPMDWQFSCDKCMELSGNINSSFGGMLCANHSSLEHFLTRNAYSSRPIFVGLSSIGRINTVQLAFS

SEQ ID NO: 71780 - protein, 651 aa, Zea Mays
MVGGLVLSQAQTHQAATPRTAAPAPAPAQALEKRPRDQAQPCGTVAAAAAVSVSAPSLDEVRKVHARHIKLGLDRCPRYARPLLAACAVSGWPGGMELAASIFESLVEPEAFDYNTLMRGHVSGGGGDRDPAAALRLYIDGLEAGVSPDSYTFPFVLKACAQLAALQEGRQLQAHIVKLGFQHDEHVQNSLISFYGKCGAPAMARLAFDRVEAEERTTVSWSALLAAYTKAGLWGECLASFGSMMLDGWRPDESSMVSALSACAHLGSFDAGRSVHCALLRNTARLNTIMLTSLLDMYAKCGSIEKAAAAFDAMDDKSAWAYSAMLSGLALHGDGRKALQVFDAMVREGHAPDAAAYVGVLNACSRAGLLEDGLRCFDRMRLEHKVAPNALHYGCMVDLMARAGRLDDARALIGTMPTGPTDTAWRSLLNACRIHGDLDLAWHALQELRRLGAANAGDYVIVADMHARAKNWTAAAALRTEAVDSGLAQSLGFSAVEVRGELHRFVSQDMAHPRTRDIYEMLHQMEWQLRFDGYKPDTSEVALDAGEEEKGRVVAAHSQKLAMAFGLLSTPEGAPVRVVTNLRMSKECHAYSALISEIFGRDIVIRDRNRLHRFSRPQVEPPPSSPTRTKPRRNQGDAIDELSDAGAVAKA

SEQ ID NO: 71781 - protein, 766 aa, Zea Mays
MVNTGRFVVLVLAYRLLSYVVYMGSPSGGGDPEAVQAAHLQMLSSIVPSDEQGRVALTHSYHHAFEGFAAALTDKEAAALSGHERVVSVFKDRALQLHTTRSWDFLEVQSGLQSGRLGRRASGDVIMGIVDTGVWPESPSFNDAGMRDVPARWRGVCMEGPDFKKSNCNKKLIGARFYGVQPESSASNASSSAVATPAATGSPRDTVGHGTHTASTAAGAVVSDADYYGLARGAAKGGAPSSRVAVYRACSLGGCSASAVLKAIDDAVGDGVDVISISIGMSSVFQSDFLTDPIALGALHAHQRGVLVVCSGGNDGPNPYTVVNSAPWILTVAASSIDRSFQSTIALGNGDVVKGVAINFSNHSLSGEQYPLVFGAQVAAHYAPVAEASNCYPGSLDAQKVAGKIVVCVSTDPMVSRRVKKLVAEGSGARGLVLIDDAEKDVPFVTGGFALSQVGTDAGAQILEYINSTKNPTAVILQTEDVGDFKPAPVVASFSARGPGLTESILKPDLMAPGVSILAATIPSTDSEDVPPGKKQSAYAIKSGTSMACPHVAGAAAFVKSAHPGWTPSMIRSALMTTATTTNNLGKPLASSTGAAATGHDMGAGEMSPLRALSPGLVFDTSTQDYLDLLCYYGYKEQQVRKISGAARFSCPAGAPSPDLIASAVNYPSISVPRLKRGRPATVARTAMNVGPSNATYAATVDAPPGLAVRVSPDRLVFSRRWTTARYEVSFDVAAAAAVSKGYVHGAVTWSDGAHSVRTPFAVNVL

SEQ ID NO: 71782 - protein, 219 aa, Zea Mays
MADSKDLNRASPNSSTRLTNLSAAEHKRLKDDMKKIDEEVQRQKDQVLKVANKWFLSHFRVDCHQKTIQEREIDANYMSSVLQQLPTIGDARSVDDIPSIRISFDNRIKSITEDIERMAHALGKTHMPSFLSHKLGAKTIAPNTSATNGFPQPYSGMPMDSYPGRMSPPSSLNGESTLSTAGPSAHNSGPSGPSVGPSGTLRRTVRSYTEPTTRVTGVA

SEQ ID NO: 71783 - protein, 75 aa, Zea Mays
MMICLHSYKYHHSLNISLYYYTSFQSAFSTSFKRKRDNKLKKEVSTNDEKKNTTMTPQHIVRSFNWYVLYGGKYS

SEQ ID NO: 71784 - protein, 84 aa, Zea Mays
MCALHLRGSDTWRAPNYRAGEFCRGSAPFVFGASARHHRWEISGGFSGEGAERRRRVWVEIGRRTASGRQTVDGRLGSDPHTPF

SEQ ID NO: 71785 - protein, 310 aa, Zea Mays
MQIAEISAAGRVEIPTDGASEWEIDVKLLKFGNKVASGSYGDLYRGTYCSQDVAIKVLKPERINADMQREFAQEVYIMRKVRHKNVVQFIGASTKPPNLYIVTEFMSGGSVYDYLHKHKGVFKLPTLVGVAMDVSKGMSYLHQNNIIHRDLKTANLLMDENGTVKVADFGVARVKAQSGVMTAETGTYRWMAPEVIEHKPYDQKADVFSFGILMWELLTGKIPYEYLTPLQAAVGVVQKGLRPTIPKHTYAMLSELLQKCWQQDPAQRPDFSEILETLQRIAEEVGDEHEGKHKDRTLGGFFSALRGRSH

SEQ ID NO: 71786 - protein, 227 aa, Zea Mays
MAVTVVRDVETGLDASTSDRDGDAGDNPSWFTPKRLLVMFCIINMLNYIDRGAIASNGVNGTRKSCSGGTCTSGSGIQGDFDLNNLEDGTLSSAFMVGLLVSSLIFACLVKRYNPFRLIGVGLLVWTIATAGCGVSFDFWSITICRMFVGVGEASFISLAAPFIDDNAPVAQVLLLGAVEFGPAERIWKTWAPGKCKFFMWLVVHDRCWTADRLAKRGMDHPVCCPL

SEQ ID NO: 71787 - protein, 780 aa, Zea Mays
MRTLPNGSLSEDMPSRTRSGLVRRSPTVKTLSKDQSVINGLADGSLKEDMPLGTRSGLVRGTLAAKTPDGWMKNDKAAGTRSGLGGGRLVAKTVSKDKRAVEGLPDGWRKEYRPRKNGSFLDVYYIDPVSGYEFRSFKDVHRYLETGDIRQCAVRPKKSTICEVHIIESQTHASASPQHTRPGTADKGIQCEILTSDGIMVPLGELIAPYNGNDTEHTVLPEPENLKAIQGSDNKLETSEHVSVQPVSARNGSRQTKSVKRKERNAEVKSKKRKTSSAVTAVRASPRLAALKVQLEVSIKHEDAMVSINHVDQVQTIEESAIDQAHKSQSGSVDEIHGNLESTFSQLQLSQADTANGMQAMQENTTIHSQPSQLDTLNPTHRSQENSGNQLQSVLTDSSIPKRTTQECTIDEPSQPGINHIHTDQEFTGNQFRSNLPDDTVISLRDIEECTAHSKPSNTDSTGQIQANEENTANQVQSSLTDTVIPVPVIQEYATGYSQLSKANTSNKKQANQEYIADQVQSSLTDTVIPVQVIKEYTTGYPHINKADISNQMQANQENTDDHLYLSQVGCVTQMQIIEENLPKQPQLSQSGTGGRIQIDLESTTNHLLPNYDENSMLQCGLSWAPEQNSGALSTDFWKNVETQASSVSMPINGAPVASFPANVRFHNAAAAAEPALPPQVAPAEAGSDQSGLAFQSVFGNIWSDPCIEFAFKTLTGDIPVLDDTTAVTDYFPEQQDLNKGPAPNRAGSVDNSRNHTQVDVNLPPPALDDFYNGNWFPPQ

SEQ ID NO: 71788 - protein, 1103 aa, Zea Mays
MASASFQPVAASAASAPPRPAPRHPFAAAAAARRSSLSLRPAAHRPVIPLRSSAVAANTLRATHRRAVSARSRRRAQGLGAAPALAASTWGGGDKGGCLSCFPKSRRGRSGLAPCALPHASGLSFRSRLSGSKVRPSHILHAAGPDEPHVASPTWSDTSLDTTDMDHAISKEELEDVLNTPLPEHPKLIRGQLKNGLRYLILPNKVPANRFEAHMEVHVGSIDEEEDEQGIAHMIEHVAFLGSKKREKILGTGARSNAYTDFHHTVFHIHSPTKTKEYGEDLLPFVLDALSEIAFHPKFSSSRVEKERRAILSELQMMNTIEYRVDCQLLQHLHSENKLSNRFPIGLEEQIHKWDPDKIRRFHERWYYPANATLYLVGEIDDIPRAVREIEAVFEHTLSENEGNPVPSANPFGAMASLFAPKLPGGFTSNLTGEKSPATDKIKPAKRERQAVRPPVEHKWSLPGVAQDAKPPAIFQHELIQSFSINMFCKIPVSKVQSYKDLRSVLMKRIFLSALHFRINTRYKSSNPPFTSVELDHSDSGREGCTVTTLTVTAEPQNWRSAIKVAVHEVRRLKEFGVTMGEMTRYMDALIKDSEQLAMMIDSVPSVDNLDFIMESDALGHTVMDQLQGHESLLAVAETVTLEEVNTVGAEVLEFISDFGKLNAPLPAAIVACVPQKVHVDGAGETEFEIYPEEITEAIKAGLEEPIYREPELEVPKELITQSELDDLKSQCNPSFVPLTKEENAVKVFDSETGIAQRRLSNGISINYKITQNEARVGVMRLIVGGGRATEDSESKGSVIVGVRTLSEGGCVGNFSREQVELFCVNNLINCSLESNEEFIFMEFRFALRDNGMRAAFQLLHMVLEHNVWLEDAFNRATQLYLSYYRSIPKSLERSTAHKLMLAMLNHDERFVEPSPHSLQKLTLQSVKNAVMNQFVGGNMEVSIVGDFTEEEVESCVLDYLGTVRASSSLNTEERIEKISFRPFPSDVHFQQVYIKDTDERACAYIAGPAPNRWGFTTEGNDLFNVIRISDADAEVSEPVSLDLTGKRHVDVRSHPLFFGITLSLLAEIINSRLFTTVRDSMGLTYDVSFELNLFDKLGLGCC

SEQ ID NO: 71789 - protein, 911 aa, Zea Mays
MNAMNDELPRIQEQVYYGHIQSHTDILEKFLSENSYKRYNPSITGKNAEKKFVSLFASYHQDSFIFNDMKYLQSPGTTDDAKPVTHLLAIDLSSKVGTKLLYEAILYLMDGSDRARVGLLLYVHTGGSSPILLLKDIFDRTISSFSYKEKVLVFLHGLLKFYDAQPLPASSVADDWTRTMMEKVYTLAAETALPVDDYKAWFKSFSADTVLKGMDKLSDFLFGQLGLVFGSNAVITNGRVFIMNEGKSFLANDLGLLESMEYDLRTKYIFEIIEEVEFASVDPDDLTNQFYSDIAMLISSSMSVRERTSERAHFEILHAEHSAIKLNNANSSIHIDAVIDPLSPTGQKLAPLLRILWKQIQPSMRIVLNPISSLADLPLKNFYRFVLPSMDDFSSTDHSVHGPKAFFANMPLSKTLTMNIDVPEPWLVESVIAIHDLDNILLENLGDVRTLQAVFELEALLLTGHCMEKDRDPPRGLQFILGTKQRPHLVDTLVMANLGYWQMKVSPGVWYLQLAPGRSADLYELPPKLIAIDSLRGKLMHIEVQKKKGKEHEDLLNAADDYHFQEKTDNKGWNKNLLKWASSLITGDASSKSKADKTTDRKDARQGETINIFSVASGHLYERFLKIMILSVLKKTQRPVKFWFIKNYLSPQFKDVIPHMAREYEFEYELVTYKWPTWLHKQKEKQRIIWAYKILFLDVIFPLSLRKVIFVDADQIVRADMGELYDMNLKGRPLAYTPFCDNNKDMDGFRFWKQGFWKDHLRGRPYHISALYVVDLAKFRQTASGDTLRVFYEQLSKDPNSLSNLDQDLPNYAQHTVPIFSLPQEWLWCESWCGNATKARAKTIDLCNNPMTKEPKLQGARRIVPEWTGLDSEARQFTARILGDDVEPADATPPPSEAPKPEDDQDVKDEL

SEQ ID NO: 71790 - protein, 248 aa, Zea Mays
MAAAPAAAGGLMQLQPPLCVSPRASASCAPSIWGALPQLRRRRALARAASSVAAGEAEAYTEPELVLLEALLGIQGRGRAVAPRQLQEVESAVQALETQGGIPDPTSSSLIEGSWRLIFTTRPGTASPIQEVYLRTDDPRVVNVVKFSESVGDLKVEAEATIKDGKRILFRFDRAAFAFKFLPFKVPYPVPFRLLGDEANGWLDTTYLSHTGNIRISRGNKCREPLLSYRRVQTQDKSYCQLYLQEQE

SEQ ID NO: 71791 - protein, 193 aa, Zea Mays
MFIRKAYRSSLQEVERGYNGSMVISVIMSVMIGVMSLGQATRSVTAFAEGQGAAHRMFKIIERKPDIDIDDNTGIILEDVKGDVQLKDVYFSYPTRSEFSLQVPSGTTMALVGDNGSGKSTVISLVERFYDPHAGEVLIDGVNIRRMKLGWMRGKFGLVNQEPVLFSTTIRENIAYEIEKPTLEDISVSDIAR

SEQ ID NO: 71792 - protein, 182 aa, Zea Mays
MDARSSVELYLHSRAPSFLSPMVERPAPSASPGSVPPMVLGFASTGPCPAPSPFPSSGIRRTLLQFFSSYGARVGVLDSSVWRAAPFSLSLCVSCSSLPVIYCSLALLARPPTTVVPRHAVAASLAPSVLAIACRGILLVLGHGICAPSSISRADLRACCSLARSGRGRRRVVEPRPPLLDS

SEQ ID NO: 71793 - protein, 51 aa, Zea Mays
MDLFSALRSVQDARSCSIYTAHCNSKLYFFTSTNLNVLEFIRSNKRAQGIV

SEQ ID NO: 71794 - protein, 112 aa, Zea Mays
MADRLDVLLYLGPFVDSLNISPHDSVQTLVKFLGCVSTKIQNSLDQKLQLPIVVKGLVLRTLDKVSCCYKVLCIPGECLINLGADLLVFFKRELPSFLNNSDRGRRQPDCGC

SEQ ID NO: 71795 - protein, 58 aa, Zea Mays
MHLSTFFILCFSYDFPFLLIISPLFKSLLTLSYIRLKVSFNAQFLPLCHKSPKRIQRI

SEQ ID NO: 71796 - protein, 218 aa, Zea Mays
MRCRGASSGYHYGNKEPVGKAEGAASGCCITCIQSQGTIASHSAPPRGPYLIFRLWQVIAPSSSSFASSNQAAPGSGHGITTKECRYQDYQQPGDPRVPGGPGWPAGAGRGARHGIVPVRGGKRQDRRPRGTGARIPPPRYRFALPLRTCRRRRRGRGSAARDRGVQGGGVRDDQDVVLAVPPGSRATFPQGELAVLISSSVGTFKWIMLICTWFIGR

SEQ ID NO: 71797 - protein, 178 aa, Zea Mays
MVFALAIGLATRDDLWMNAGLVRGALGNPGAWRCLGHHELLTGAICTAAYHTSPWPPVGREERRGFRRRRAPVQALLHSHLRTASLGAPWTMASAAPPRVEQRENEGERERRALRGHSGSSSSIRIRGSRPRPRGGTYVVAARGISRRTTGEAPRLWSSRTASPTSIFWVRTSPLISP

SEQ ID NO: 71798 - protein, 110 aa, Zea Mays
MEADGGASRLALAAGARGQAIARDGGGGGCECSHLMCLAWMLLARCVLGKLQVHRLVKHVCPKVNIQKDNGVQMKIIGTHVDATEIVYDEDSYNKVYIDWTTDFSLPFLQ

SEQ ID NO: 71799 - protein, 729 aa, Zea Mays
MWSPQASFEEVDVAWRHYEQAGTGLAAIFINLAVENFSGWKYTATFAIIKHSYFVGFFVYTVFNLALVFSSVYIVTNFAPAAAGSGIPEIKGYLNGVDTHGILLFRTLVGKIFGSIGSVGGGLALGKEGPLVHTGACIASLLGQGGSAKYHLSSRWVRIFESDRDRRDLVTCGCAAGVAAAFRAPVGGVLFALEEVTSWWRSHLMWRVFFTSAVVAVVVRSAMNWCNSGKCGHFGAGGFIIWDISGGQEDYSYQELFPMAIIGVIGGLLGALFNQLTLYITKWRRTCLHKKGKRVQIFEACLISLVTSTISFVLPLLRKCSPCPKLETNSGIECPHPPGTDGNFVNFYCSQDREYNDLATIFFNTQDDAIRNLFSAKTFHEYSAQSLITFLVMFYFLAVVTFGTAVPAGQFVPGIMIGSTYGRLVGMFVVKFYKKLNIEEGTYALLGAASFLGGSMRMTVSLCVIMVEITNNLKLLPLIMLVLLVSKAVGDFFNEGLYEEQARLRGIPLLDSRPKQVMRNMNARDACKNQKVVCLPRVSRVVDIISVLRTNKHNGFPVVDRGQNGESLVIGLILRSHLLVLLQAKVDFQNSAFPCGPGVLNRHNFSDFVKPASSKGKSIDDIHLTEDELGLYLDLAPFLNPSPYIVPEDMSLAKVYNLFRQLGLRHIFVVPRPSRVVGLITRKDLLLEEDNNNVMPELQSTSVRGLLNGKMLGGNIHLERPLLDNLVIE

SEQ ID NO: 71800 - protein, 182 aa, Zea Mays
MAERAWSHAMEKKTAGTNAKQRIYMLGRFRKAVKWASLFSQLCSVKGDSRTSLEAEAYASYMKGALFFEQDKNIDAAMINFKNTRAIYEELGKYGSIENQLLCRQRIDEVEPMIDFCSHKLGGSYLQAHELLDTANDLLKAKMEAVLSETRSQQAASMTEFKWLGRTFPITNAKTRVSILKA

SEQ ID NO: 71801 - protein, 373 aa, Zea Mays
MVTNQDADAAAPGAGATVDPMRLASRWRSRPEWNCASAELEAEPSELNTVNSSGLFSVVSTDKLSVKYLGSHHHGHDVGVVQADRPAPTRRAVYYFEMGVRNAGYKGQTSIGFTSESFKMRRQPGWETNSCGYHGDDGHLYRGQGKGESFGPKFTSGDIIGAGINYLSQEFFFTKNGTLVGAIPKEIKGPLYPTIAVHSYGEELTVNFGKEPFCFDVEGYILEDKMRQQSVSDKLNLEPDISHWIVRSYLLHYGYQDTLNAFDMANATDRPTSRQNGNAEPPEMYGLSHRKLLRQLIMSGDIDSTFKRLREWYPQVIKDEQSVICFLLRSQRFIEYIRAEQLEVAVKYGRANLASFFTHKAFEGLLKCGPTCV

SEQ ID NO: 71802 - protein, 266 aa, Zea Mays
MISPERSSSQSQRSAAAGAPFLSISVTDPVKMGTGVQSYISYRVITKTNLPEFEGPEKIVIRRYSDFEWLHDRLAERYKGIFIPPLPEKNAVEKFRFSKEFIELRRQALDLFVNRIASHPELKQSDVLRTFLQADEEIMDRARSYETGIFKKPADFIQMFKSKVSDVVLGKEKPVEESTPEYEKLKNYIFELENHLAEAQKQAYRLVKRHRELGQSLADFGKAIKHLGACEGDLMEKVFSEVGSKSEMLSIKLQRETTFSLTLKNP

SEQ ID NO: 71803 - protein, 91 aa, Zea Mays
MTGDVLRLKDSKCLYGGAPKGPQLRELERGVDILVATPRRLNDILEINRVSLHQVSYLVLDEADRMLNKYHLYKYIRPLQLPCRRMNEKTG

SEQ ID NO: 71804 - protein, 698 aa, Zea Mays
MATLVQPPAGAVVGSVANTLTTPGSASGPPPSSSSPTSASTPPPTDVPSSSTPTPPPPSPASPTPPLPSPSTPPAASAPPPPSPDDSAPPPPEASSPPPPAALPPPPAPAALPPPPPAPVPTATPPPPPPPDIATQPPSSSQASPPPSAPPPRQSHATPPPSPPPTASPVSATPPPPPVHSPVYYAPPPPARTSSSTPAKHSPTVGDSSTSTTTTTTPPPSSSSSSSSGLSSGATAGVAIVVVIIVLGFAGVLVCLSKRRRRKERDRYYGGFAVPSYTPQHLSGEAPFLRAPSAPGSMNFSMLGGGGGPGMSTPPTMSQAYGQQPWGGASANYSATSAASASGDLSVGNTKAFAFDELYGITGGFARENVLGEGGFGCVFKGTLGDGKVVAVKQLKGGGGQGEREFQAEVEIISRVHHRHLVSLVGYCIAEDHRLLVYDYVSNNTLHHHLHGRGRPVMDWPTRVKIAAGSARGLAYLHEDCHPRIIHRDIKSSNILLDDQFEAQVADFGLARLAENDVTHISTRVMGTFGYLAPEYASTGKLTEKSDVFSFGVVLLELITGRKPVDSSRPLGDESLVEWSRPLLNRAIETQEFDELVDVRLEGNFDDVEMFRVIEATAACIRHSAARRPKMGQIVRVLDDSLTDVDLSNGVQPGKSQMFNVANTADIRQFQRMAFGSQDFSSDYSQSRPSIGSSRRDF

SEQ ID NO: 71805 - protein, 423 aa, Zea Mays
MFHNKVLIRAAAASSSTSSPTSSLPPFILRQLSVSAAAPVPAVDLEILCCRVSRRHRLACLPQPPADALLVFQRCQSLVAVEAVSEIAAAFLGASVGEEEALVCSGSLVAEAVRCELRSMMLDHGWRCLGENIYVDSKFDQNDGRTDLCAVNVEVRLGRNDDFEFIVSPDAFRYTMHKNSDVASSSMVETFHHSNEVVLDTSNILTSCTTLPALQEGRVIGYSKMLPSEQCLGRFMELCLLKHGLDTNCNYHVAVKLTYGASWETKWWPSSLVLQGPGLQPALKSIRVSKAMSALQSFVELLKAWSFFGHNSLTIKEQVLLNCSSTLPAWDKAASDLPPHSSRTVNTENLDLGHTDVMSKHKSFILDFRTPKPAVICSLSAKPWNTNVHKIAHSLDDNENLSELSPISFRFQAQQLATNSSYK

SEQ ID NO: 71806 - protein, 110 aa, Zea Mays
MRATAGDQTLSRREQQDAWDQKASRWWPSGKQEWLRQALMGAECSRRRVWREHCNRDARAATTAISGIVGVWHERASSGQMEERERGFYRGYRGAPQSSMNVAMNSFNVH

SEQ ID NO: 71807 - protein, 189 aa, Zea Mays
MADAEDIQPLVCDNGTGMVKAGFAGDDAPRAVFPSIVGRPRHTGVMVGMGQKDAYVGDEAQSKRGILTLKYPIEHGIVSNWDDMEKIWHHTFYNELRVAPEEHPVLLTEAPLNPKANREKMTQIMFETFNTPAMYVAIQTVLSLYASGRTTDFRDYLYRNFRYSVEKTEGLGVFRTHVLTGLARCILVQ

SEQ ID NO: 71808 - protein, 197 aa, Zea Mays
MCYSNEFGNKNGASNNSLWFNHNETSGSTISTVMPPVSPSTLSTSTGLNRSPDNPHSGGTGIQSTQFYWDTANPSSCSSRGSSGSNGLGFELQSTSSLLESSVFPWTELTPDKNSQVHLGEELKWPDLLHGTFTDTPATMQNLSQSLYEDVIKAESQFNIEGLCAAWSQNLQPQQHLQVSDLYDKDLQRMSLSFENI

SEQ ID NO: 71809 - protein, 127 aa, Zea Mays
MQELDVSNGIVRGKLDQLRRCFEVQFAAGRDLTPDQLKNMIETLSDWLGTSDRLLHQIQEKIKWADTMSEVNKKHQKEFEDRVEEAKKSIKADIDLRGHDEFLSESGGIMDFEEDRVRPKRRRQPPA

SEQ ID NO: 71810 - protein, 248 aa, Zea Mays
MAYTTSPSTSTSTAAAVAWAFAAATCVKLLLVPTYRSTDFDVHRYWLALTHALPVRQWYTDTSSQWTLDYPPFFAYFSRLLSLPAPLVDATLVSIPVRDATPFAHLIYLRLTVAFSDLLLLGSVLLLARDAQRKQRPFLALALVVWSPALLAVDHVHFQYNGFLIGLLLLSLHFLEQGWDLIGGVVFACLLCSKHLFLVAAPVYFMYLFRHYCCGRGVVKGLGRLVLMGSGVAAVFAAAFVPFVYYED

SEQ ID NO: 71811 - protein, 1026 aa, Zea Mays
MGFRCPARKGVADFLQEVTSRKDQGQYWYRQDRPYRFVPVKKFADAFSIFHVGRSTQNELSEPFDRTRSHPAALATSKFGASRMELLKATIDRELLLMKRNAFMYIFKAVNLTVMSFIVMTTFFRTNMKRDASYGNIYMGALFFALDTIMFNGFAELAMTVMKLPVFFKQRDLFFFPAWAYTIPSWIVQIPITFLEVGVYVFTTYYVIGFDPNVFRFLKQYLLLLALNQMSSALFRFIAGIGRDMVVSHTFGPLALLAFQALGGFILARPDVKKWWIWGYWISPLSYAQNAISTNEFLGHSWSKIQNGTTVGIGVLQSRGVFTEAKWYWIGLGVLVGYALLFNLLYTVALAVLSPFTDSHGSMSEEELKEKHANLTGEVIEVRKEKTSRRQELELSHSVGQNSVHSSEDSSQNRKGMALPFPPLSLTFNDIRYSVDMPEAMKAQGVTEDRLLLLKGVSGSFRPGVLTALMGVSGAGKTTLMDVLAGRKTGGYIEGDITISGYPKKQETFARISGYCEQNDIHSPHVTVYESLLFSAWLRLPSGINLETRKMFIEEVMDLVELTSLRGALVGLPGVSGLSTEQRKRLTIAVELVANPSIIFMDEPTSGLDARAAAIVMRTVRNTVNTGRTVVCTIHQPSIDIFEAFDELFLMKRGGEEIYVGPVGQNSSKLIEYFEGIEGISQIKDGYNPATWMLEVSSSSQEEILGVDFSEIYRQSELYQRNKALIEELSTPPPGSSDLNFPTQYSRSFFTQCLACFWKQKKSYWRNPTYTAVRLLFTVVIALMFGTMFWDLGRKTNKQQDLFNAMGSMYAAVVYIGMQNSGSVQPVVVVERTVFYRERAAGMYSAFPYAFGQVAIEIPYIFVQTLLYGVLVYSMIGFEWTVAKFLWYLFFMYFTLLYFTFYGMMAVGLTPNETIAVITSSAFYNVWNLFSGYLIPRPKLPVWWRWYSWICPVAWTLYGLVASQFGDIAHPLEDSPTGQTVAQFITDYFGFHHDFLWVVAGVHVGLTVLFAFLFSFAIMKFNFQNR

SEQ ID NO: 71812 - protein, 75 aa, Zea Mays
MPTPSACASPPPSQPRPWRRRRPPPTFPPWAPSWGSPQCSWVVAEKIGAAGFMLKEVVRCPAPRSSSSRSWSFGQ

SEQ ID NO: 71813 - protein, 86 aa, Zea Mays
MGFTYSINTVAQSFMDWPQTSSKNNPNTEISDLTYCSQSENAETWQPDFGSLFLINSYSFKARILNKSCSAIVTLQVCYSNCFQNT

SEQ ID NO: 71814 - protein, 260 aa, Zea Mays
MSIGDVCPKESEEPSQAQDQPSFSTQASPPTLNGDEAQDDEGEDQGDEPPQDDGNDQGRDANDQDKEDEEPKRLPHPRVHQAIQGDHPVDTILGDIHKGVTTRSRVAHFCEHYSFVSYIEPHRVEEALQDSDWVMAMQEELNNFTRNEVWHLVPRPNQNVVGTKWVFRNKQDEHGVVTRNKARLVAKGYSQVERLDFGETYAPVARLESIRILLAYATYHGFKLYQMDVKSAFLNGPIKEEVYVEQPPGFEDSEYPNHVY

SEQ ID NO: 71815 - protein, 216 aa, Zea Mays
MSQAGAFPPGKKITVVFVIGGPGSGKGTQCSKIVRHFGFTHLSAGDLLRQQVQSDTEHGAMIKNLMHEGKLVPSDIIVRLLLTAMLQSGNDRFLVDGFPRNEENRRAYESVIGIEPELVLFIDCPREELERRILHRDQGRDDDNVDTIRKRFQVFHDSTLPVVLYYDRMGKVDGAKSADAVFDDVKAIFTQLLTTQASQGGNASSRRSNPPLCSVL

SEQ ID NO: 71816 - protein, 865 aa, Zea Mays
MALPSATVLWTASITFRLAQNMVVLFFLAALLAAPARSSSPSSNNGAGLQQPTLTLCSGHSTVAKSGEFASFLAAVCAGAYGGGVAHMSHSMSSYVAAENRTMYGVAQCRPDVSASDCTACLAAASSKLITGTACATSAVWHDACFLRYSDRDTGRFREDEHTETVFNASRALSSLPPHVGANKAVVVRRLLAAVADSTRSGHMCSDIGVGTGAAGGGRIYGLTRCAAEISCADCRRCLGGALAVVEREYNGSAGMQVLRLSCMARYESYPFYNTKFLTRRLLASATSGSPRPTHGGIVFNSSISFGPFGLVHSGGPNPPPSPPVSPPPPAFTTISVPASVGTAQPTPPPSRPAQAQPSPPPPAASMIVSGPATATPRAAQAQPTPAPPGGHNPPPASPPPASIMNISGPATATPTPRAAQPTPAPPGGPTPQPVAAATNENKGKGTLNTPKWQIVSIATGLVAAFIILALTVWCRRKQQLSQREHVIEPHVLNHQADGVPGETMHHLEKKHLGSEEDDDGGRTSCQLYSYLVLEAATCRFSSRNKLGSGGFGTVYKGTLENGKDVAVKRLRDSKRAIQELEREISIVASLRHKNIVRFLGYCFQEEGRFFIYEYVLNNSLDKFWYKASSQCQKLEWATWFNIILGVARGLLFLHDMGIIHRDLKPHNILLDRNFNPKIADFDLMRMYDQQKTHESTEKVAGTFGYMAPECTSGRKFLLSIKSDVYSYGVLVLEIITGHKIYTFEGQNSEGLVEYALGIPSLNRIEFRAGVAALVHWIEKRASDVMDADLGVEGHEHAPRQALRCVHVALLCVQSDRSRRPTMGQVIAMLSSGDDGTDDLPEPSLPGYVLRPMAASGVQLCFGCR

SEQ ID NO: 71817 - protein, 100 aa, Zea Mays
MLPQARVVYCSATGASEPRNLGYMVRLGLWGDGTSFENFNQFLGALEKGGVGALELVAMDMKARGMYVCRTLSYKGANFDILESLLEERMMDIFVSMIAH

SEQ ID NO: 71818 - protein, 128 aa, Zea Mays
MADFSVNGVDSLQKIRFTNPTIFPRHPGVLDPWFWNLFQVDFYNSIIITKKHPVVHHRVIDWEGCERMHDNDMTQALRIFERKGLKNIMTLEYSWNNEVVAQFYATLWIKKVDEEADGYDYPVMYFYI

SEQ ID NO: 71819 - protein, 71 aa, Zea Mays
MLSHTVRRRTTQRRGPKMCDTRHAVSLSRDRATTTTAECGKGLENDDGPNRGRTKQRSSRRTNSARRPWTR

SEQ ID NO: 71820 - protein, 175 aa, Zea Mays
MDPCNSSVGTIAYMSPERINTDLNDGYAGDIWSFGLSILEFYLGRFLLCENLGKQGDWPRSCSPSATPTRRRRRATPRNKPSAQVRIDVVVGKDRLLDVSMHKISVAAIQTGFGFERFQAMSYSAVMKANKQFTIMLLLVKLDPSGDFCVALTLKLPVYAGCSFEFVIPLQLLLS

SEQ ID NO: 71821 - protein, 123 aa, Zea Mays
MQIKCLLEMYGLKKKVRSDISAEYWLHKECAYRERQLFDFWGLMWIRHPLSMYGIGYILSMDADDVHRKKRFTERMSRLEEEEKNQANIRKRKFFAEILNASREQQVQLGTTFKQIKQRNDEV

SEQ ID NO: 71822 - protein, 256 aa, Zea Mays
MATARLPSRSFLSPAQQSYPRLPASVRLCLSHHEQPPTGPKRHRRAATSHPAFSAAARGRAKKIPIADTDEPAAGVRVTDRGISYRLDGAPFEFQYSYTEAPRARPVALREAPFMPFGPEATPRPWTGRKPLPKSRKELPEFDSFVLPAPGKKGVKPVQSPGPFLAGMEPRYQSVSREDILGEPLTKEEVSELVKGSLKSKRQLNMGRDGLTHNMLENIHSHWKRKRVCKIKCKGVCTIDMDNICHQLELDLHLLL

SEQ ID NO: 71823 - protein, 1289 aa, Zea Mays
MAGSVVTDDSAASTTGMRDDENSLSGESFSEWRSCDRADSDTPSTSPPFWDSDGDDDDPGPKPSELFGHHTWRIENFSKEKKREMKSEPFEAGGYKWYILVYPQGCDVSNHLSLFLCVANHDKLLPGWSHFAQFTIAVANIDPKKMKYSGELNLVCFLLGRFWKKEHDWGWKKFMELSKIQDGFLVDDVLEIIAQVQVIREKVDRPFRCLDRPYRRELIRIYMTNVEQIYRRFVEERRSKLSKLIEDKMKWSSFRAFWSAIDPNTRHHMSREKTETILKILVKQFFVEKEVTSTLVMDSLYTSLKALEYRMKSKKCKTKLADLEELPAPMVHVDMDMFVLADDVIALLERAALEPLPCQPVAPKDDKTSQSRMKDGSSGEVYKVSMEREERRLTELAQKILETFVLSHIFSGIEVAYQEAVALKRQEELIREEEEEAGLLEHQMKGKRGGGANEKDKRAKKKQTKQKKNNRKAKDKERDVKCEVKILERLHDETVIDNSDGLPAKVEVIAKVDALEEGSSDGSDMPNRGKNQCNKGLSISLAKEGDGLPSTSSVTGGSGRNSSGCCTAPKLDQDTVLLTLRDKLRKLGQRLQEKNIEGQKLLKAHFEARDTKVKVEESSDSSNSLDRPPDVPESSMHSSEDTVDLKVNGTPNKDASVVNPVLEESVSGIPVTAKNESLPSARTKEGPVSNKDNASSLKMKTMASCLKLHPADVDKDAPFPSKSPRINRAAPVPSKLPSADKATPVLPKSSLSVNKAALVRPKSPAVDKATPVCPESPAVDKVTPVRPRSPAVDKATPVRSQSPAVDKATHVCPQSPSVDKATPSIDKATPVRPKSPAIDKVTPIPPKSPPVDKASPAPPKSLSGAKDVPVPSRSLQIDRFIPAPPRLSQVDKAALPSSEQPHISPATNSEAQGATTSRKVTASSVLEVAAASRPSSAPVLPTPRSTAPVASHIQTSTLLSRSMSEAAGRRSVNDPSFSAPSYTPQTYRNAIIGKTGLATTSANLAYQSYSLGQDTAPSQPLSAYASSTAVMMPPAGRSDQSSARHGFKSGSGKLEAHDSWQQWKGDNNVDMHLWRDHTTYQQMTRGQAYDQSRRDDTYQQTCSRGTEKFSRHAGLQARQFQTETPASHVWHQQQGQVAEEFPHLDIINDLLEEDQINGSIPESFHQDYNVFGLPFSPRGNVSDMGMASVRSPARFNSTKYEYDGGFSGAYDINAVNGLRERQFPSLDSYSNGLSDVSASKPWLNGSPSPSVMSLGVNTNGYHPQVADYPSLGNGVNGVSLWRRHANGRW

SEQ ID NO: 71824 - protein, 131 aa, Zea Mays
MSFFFRMASRLRPSTPEEVVRSIKDSFLALHTRTHAKALEEVEKNMSSLRLLIFGDGEVEPNEEQVLQITLEICKEDVISLIVQDLPSLGWGVRKDLAICWCILLRQKVDETYCCVQYLENHLELLDFLVG

SEQ ID NO: 71825 - protein, 436 aa, Zea Mays
MSSSRFSPALQASDLNDFIAPSQDCIISLNKNTSSSSRRPQNKQKETTVSSKPPEEAVKISLKDCLACSGCITSAETVMLEKQSLGDFIDRINSDKAVIVSVSPQSRASLAAFFGLSQSQVLRKLTSLFKSIGVKAVFDTSSSRDLSLIEACNEFVSRYQRSQPSSGQEAGANLPLISSACPGWICYAEKTLGSYILPYISSVKSPQQAIGAAIKHHVAERLGLKPYHVYHVTVMPCYDKKLEAVRDDFTFSVDGKEVTEVDSVLTTGEVLDLIQSKSIDFKTVEESSLDRLLTNVDEEGHLYGVSGGSGGYAETIFRYVAHVIYKREIEGPLDFRILRNSDFREITLEVEGKPVLKFALCYGFRNLQNVVRKIKMGKCEYHFIEVMACPSGCLNGGGQLKPVEGQSAKELIQQLESVYTQDRMQRSICTQNITQW

SEQ ID NO: 71826 - protein, 177 aa, Zea Mays
MHLPSLPWMLSAMVLGLDVDLLVTVRVCIFRRRWPPLCGPCELRSFLASYLFLTMEHQPLLPALGSLPLPWRPAPSQTCHVRRRSLTLPCCLSHHRAVCRYTVTSTMRNVARPCITSSSCLHRRLLAPHHVPPRRCSTSSTMVRPSPCSSLGFGRTCLLPVLGRASPYQSSIRSPPP

SEQ ID NO: 71827 - protein, 480 aa, Zea Mays
MVFGRSVEEVDLSGFLSVNSEWLAYLGSFRYLRVLKLADCKNINNDAVWSLSGGILMTDKTLQSLQVLTKLEHLDIWGSETTNEGASALKSFARLLSLNLALTRVNHLSIPPTTSYLNMSNCEIHSICDVDSEVPVPLENFIVSAATFGNIDKVFSSIQASSLIHLDLSSCKLSNLSFLEKMKNLEHLDLSYNIITDGAIEHIAKIGTNLQYLSLKNTGITSQALCILAGTVPNLTSLSLANTKIDDSALAYIGMIPLLRTIDLSQTSIKGFIHTEVNSEKLLSMSAFEHLKYLESLNLEDTPLSAEVIPPLASFATLKYLYLKSDFLSDPALHALSAASNLIHLGFRGNILSSFGLLQFVPPVTLCVLDLSGCWILTGDAISTFRKRHPTIELRHELLHEVEENFVGGSQFRKPRRRRSPHVKAEVGNSFAGSSRLHDIRFVDERIKYSKEEFVELQGLAKPNSLMLGVWLPPELRRPK

SEQ ID NO: 71828 - protein, 220 aa, Zea Mays
MSLCGMRAWKPRKIGHTVLAFPWFSYIRFELRSMPCIHVQWYLSISSALRLGSIKLPLALRNLHAIFLSEVTTPTRSSPHHGQGSSTGFWPRCAGSIISRVMDKDRQGAAQKRQATVRVHEARPKRQRGPAKAAASGGGKPSLPAKAGASAPSKAPEATVGAGGPRLTKVVPPASGVAEAAKAARTLPLPGKRVADFGTEINVDDYLGGKSIYIYIYIYI

SEQ ID NO: 71829 - protein, 212 aa, Zea Mays
MERGEPTSPYPEPHEPERCNIHSFCKTLTTSDTSTHGGFSVLRRLVEEGLPQLDMTHNPPWQELVAKDLHGNEWYFCHIFRGQPRRHLLMTDWSVFVSSKRLVSGDTFIFLSVTALHVKVVLYIYICFLALLNFWINLLTVLHLIEVRTKSCGSGSTLAAKMYVHTVGTPAYIAHDVLLKKEYNGKVLCVVSLIILHLTYCFCSMCMLFFST

SEQ ID NO: 71830 - protein, 274 aa, Zea Mays
MLEMIASELEALSNQLAELEEKMKFLLLPSDPLDSRNILLEVRAGAGGDEAGIWAGDLVRMYQRYCERNNWKFKPVSCSEAEMGGYKTYVMEVKGKQVYSKLKFESGVHRVQRVPLTEAMGRVHTSTATVAIMPEADEVDVVIDPKDIELKTARSGGAGGQNVNKVETAVDLIHKPTGIRIFCTEERSQLQNRERAFQLLRAKLYEIKLREQQESLRNQRKLQDNRVTDHRLKMNFELTSFLLGDIESAIQSCATMEQQELLEEMASSVGAVNV

SEQ ID NO: 71831 - protein, 175 aa, Zea Mays
MICFPIVCCLHRFSELLVVLGPAPLAVLISSSVFCLWLRVRASLLVVIVQAPLLGSPTTVVLSASARDRGRVHRVRQRSVADSTVVTATCLVACSPSVVCCTPALVPTAGSRWRSRACSSSLRCTRSHPSGFTRARVCRQAIEPVFPLLDLIFALLVAVVIMVLNYAPSSSRTGC

SEQ ID NO: 71832 - protein, 582 aa, Zea Mays
MLRAAAAAAAIFPARVAAAPAAAAAEELRYPLLRVIGTLRGSRGSVLLGRRVRFCSNSSASDSEVAAADAEANAEDATVAEEEAGSKASSAIVPTSTNIDDCLSVIALPLPHRPLFPGFYMPIYVKDQKLLQALIENRKRSAPYAGAFLVKDEEGTDPNIVTGSDSEKSIGDLKGKDLLKRLHEVGTLAQITSIQGDQVVLLGHRRLQITEMVEEDPLTVKVDHLKEKPYNKDDDVIKATSFEVISTLREVLRTSSLWKDHVQTYTQHIGDFNYQRLADFGAAISGANKLLCQEVLEELDVYKRLKFTLELVKKEMEISKLQQSIAKAIEEKISGDQRRYLLNEQLKAIKKELGLETDDKTALSAKFRERIESKKDRCPSHVLQVIEEELTKLQLLEASSSEFSVTRNYLDWLTVLPWGNYSDENFDVHRAQKILDEDHYGLSDVKERILEFIAVGKLRGTSQGKIICLSGPPGVGKTSIGRSIARALNRQFYRFSVGGLADVAEIKGHRRTYVGAMPGKMVQCLKSVGTANPLVLIDEIDKLGKGHSGDPASALLELLDPEQNVNFLDHYLDVPIDLSKQM

SEQ ID NO: 71833 - protein, 207 aa, Zea Mays
MEEWFYVKNNLIEREDIKGIIQRPIWSRFGLRRPTTALENDTEACQKAFNNVCAFIGMRDLVQEHIAYRVWPLVDKWEMSKETAAGSSQVGLVYLKYTFRYRDRFDEPNDEWLKCIEATSDELLGAYTRAKDDALTSAFGGRGKKRLNRVFDVIGFVYPNYTYPSRKQGKKRKTSASATSAAPNNKKIKVLTHRPRYIETCKVLKFV

SEQ ID NO: 71834 - protein, 1297 aa, Zea Mays
MEVALVSTVLKVLGTKLAPLALKELSSKAGVAKDLQELQDLVEEINNWLQTVGDKDRSSKWLKKLKEVAYDAEDLVHEFHIEAEKQDREITGGKNTLVKYFITKPKATVTEFKIAHKIKKIKNRFDAIVKGRSDYSTIANSMPVDYPVEHTRKTIGEVPLYTIVDETSIFGRDQAKNQIISKLIETDSQQRIKIVSVIGLGGSGKTTLAKQVFNDGNIIKHFEVILWVHVSREFAVEKLVAKLFEAIAGDMSDHLLLQHVSRTISDKLVGKRFLAVLDDVWTEDRVEWERFMVHLKCGAPGSSILLTTRSRKVAEAVDSSYAYDLPLLSMEDSWKVFQQCFGIAMKALDPEFLQSGIEIVEKCGGVPLAIKVIAGILHGMKGIEEWQSICNSNLLDVQDDEHRVFACLWLSFVHLPDHLKPCFLHCSIFPRGYVINRCHLISQWIAHGFVPTNQARQAEDVGIGYFDSLLKVGFLQDHDRDQIWSTRGEVTCKMHDLVHDLARQILRDEFESEIETNKQIKRCRYLSLTSCTGKLDNKLCGKVRALYVCGRALEFDKTMSKQCCVRTIILKYITADSLPLFVSKFEYLGYLEISDVNCEALPEALSRCWNLQALHILNCSRLAVVPESIGKLKKLRTLELNGVSSIKSLPQSIGDCDNLRRLYLEGCHRFEDIPNSLGKLENLRILSIVHCFSFEKLSPSASFGKLLNLQTITFNCCFNLRNLPQCMTSLSHLEMVDLGYCYELVELPEGIGNLRNLKVLNLKQCTQLRGLPAGCGQLTRLQQLSLFVIGDSAKHARISELGNLDKLDGELQIKNIRYVKDPSDTDKVRLKKKIGIRKLSLDWYSRLEVQPDDVEEELSLNMEKELHLLDSLEPPSKIEKLRIRGYRGSQLPRWMAKQSDSCGPADDTHIVMQRNPSEFSHLTELVLDNLPNLEHLGELVELPLVKILKLKRLPKLVELLTTTTGEEGVEVLCRFHHVSTLVIIDCRKLVVKPYFPPSLQRLTLEGNNMQLVSSGCFFHPRHHHASHAHGDESSSSSYFADETGTHLERLELRRLTGSSSGWEVLQHLTGLHTLEIYMCTDLTHLPESIHCPTTLCRLMIRSCDNLRVLPDWLVELKSLQSLDIDSCDALQQLPEQIGELCSLQHLQIISMPFLTCLPESMQHLTSLRILNLCECNALTHLPEWLGELSALKKLLIQSCRGLTSLPRSIQCLTALEELYISGNPKLLQISASYSKEDKDGQLQPFRCCRPDDQHCSEAQEFDLVRNMLIVAVEERYKDAAQYRGQHSMLRSKKKNAI

SEQ ID NO: 71835 - protein, 224 aa, Zea Mays
MALIIKSFRQILKQRKGKNYKSRSKKVCYKCGKPGHFIAKCPLSSDSDRDNSKNCKRREKKRYHKKRVGDAHVCREWDSDESSTDSSDDEDAANIAVTKGLLFPNIGHKCLMAKDGKRKKVKSKSSTKYESSSDDNASDEEDNLRTIFANLNMEQKEKLNELISAIHEKDDILDSQEDFLIKENKKHVKVKNAYALEIEKCEKLSSELSTCHDTITNLKMKMPN

SEQ ID NO: 71836 - protein, 522 aa, Zea Mays
MVSQAPMAGAGAGAGANLTAALCRKSNRVARVLAYALLEWVLIALLLADGVFSYLISRFAAFFGLAPPCALCSRLGVDSLFETHPRHRGVGAEPLRRLLCDVHAAELSRVGYCSAHRRLADAGDMCEDCAAAAAAAPGKALLSWMGQSELGERDLACACCGVALESGFYSPPFLLTASAPRGSDCGHKEEEEAARPNGDVVFVSEEGPVIELFDEKPFVEGDSIGVLACGAEVVANVERLVPLESIDSLPVAMATMLSQSGVEGKEAVDHDDVRQNNVDMEHTVSTDEETIVMTSDDDKVDDVVDRLIDEHIAAVVFVPACIESTPNDGINAGKTVEAFAFADHQSAEDDSGLKDKDQKISDISEDEQAEQATPQQELCAMPTNPSDHEIVERLDRSIDLEHFPQAKSKHKMNSMPVEASEHVTVTQIEEKQVQQAEVTQELDSLPICSREQAEVTQAGLEQDCGSVPIDSGEHGCLTSYAHTDVEQAEVKQKVTSVTRDVLDYAAGTFNVNTNTWKGTAGF

SEQ ID NO: 71837 - protein, 71 aa, Zea Mays
MATLLQFLAIVLHQDDLQRHQMTLLLLMMVKMCKRKGVLQHLVLSMRMTLQQHLQLNHPRRPRGKTMVLNS

SEQ ID NO: 71838 - protein, 512 aa, Zea Mays
MAATSAPPASAHANGNGSLVGVAAPVGAPTNPMATALLTDQYQFSMAYAYWKAGKHADRAVEVDCSDVEVYSIPEGSVVFPKVPLMRVEGPVAVVQLLETPFVNLINYASLVTTNAARHRHVAGKSKVLLEFGLRRAQGPDGAISASKYCFMGGFDATSNVLAGNLFGIPLRGTHSHAFVSSYMSLDEIPDKALKSKDGSRLCQDFVSLVQEWLQKIQAANSLGGVFGDTNKSELAAFASYALAFPSNFLALVDTYDVMRSGIPNFCAVALALHDLGYKASGIRLDSGDLAYLSIEARKVFSAVEKEYNVPGFAKMLITASNDLNEETIDALNKQGHEVDAFGIGTYLVTCYSQAALGCVFKLVEINNKPRIKLSEDVAKVSIPCKKRCFRLYGKEGYPLVDIMIRESEPSPKAGERILCRHPFIESKRAYVVPQHVEELLQCYWPGTSDKPRAELPSLEKIRSRCMQQLEMLRPDHIRRLNPTPYKVSVSTKLYDFIHRLWLNEAPVGELQ

SEQ ID NO: 71839 - protein, 464 aa, Zea Mays
MAPRSSTFLSRVADAARPLSVSARPRLSPSCPSHTAAAPAFSPPAFHTHLASVASHLPSLLAALSRARAARLPLLPVTRALAASALLRHGRLPDALAHFSLLPDSDPTAPLPVPLCNSLLSALASSTGSLGHARKVFDRMLAGAVELNTVGFGVFVNAAGRKDDGLAEVLRLVDVVGCQGRRVNRSVVVAMLVDGMCREGRIEDAWRAMDEMRLRGWKPDFLAYRIVAEGFRVQGRVEEEGRILKQKRKLGVAPRKDEYRECVLVLVSNRLFREAKEIAEAVVLGDFPIDDDVLNILVGSVSEIDVDGAAMFCKFMMGKGRFPSTEMLAHLCESLCKSGKGDEMWEILRVLLDKGYCRNARGYHLVVSFLGKAGKVREAYDVLKEVKKKRLEPDISSYNSLMEALCRNDLLRPAKKLWDEMFTSGCSPNLQTYNILITKFTEMGESQEVQQLFDHMFQKGCWSG

SEQ ID NO: 71840 - protein, 74 aa, Zea Mays
MFALLGREIFDGMFALRDRKISTLSFLGQQCSQVLLLPHSQMVMCFYFMYYLNIEYSVKLLLQIGPAGWSGSYM

SEQ ID NO: 71841 - protein, 65 aa, Zea Mays
MKSAPLDLYPSVVVVYPFIGVLGLIWALGCGSNDGELPIPFRQTRFTKEPLDFLVINPPSAIHTE

SEQ ID NO: 71842 - protein, 94 aa, Zea Mays
MAGVHPVFHVSMLRKFLWDPDHQIEMETIAVQQNLTLECRPVRILESSKRVLRKRSIKYVKVLWTNQSEREATWELEELMRQKYPELFVVGKCC

SEQ ID NO: 71843 - protein, 724 aa, Zea Mays
MSFVNLSTAVDWAHEINMLSTLKELLLQQSGLRSTAPSLRQFNLTILEVLDISGNIFNTSIAPNWFWNATSLTFLNMKQCYFYGSIPDEIGRMTSLEQVSFNTNNHMSTMIPSSFKHLCNLKMLDLSANNISGELPNLPGPLTNLTYFVLSDNKLTGTIPAWVWTLRKLFILELRWNKINGVVNEGHLNGLTDLVFLGLGLTQLQIKIRPDWIPPFKLQAVLLDSLQLGPAFPSWLKSQTSMKILSISNASINAIPDWFWVVFSGAELLNLSDNQIFGALPATLEFMATNTMVLSNNRFNGTVPKFPKNITYIDISRNSLSGPLPYDFVAPWLSKLLLYNNSISGTIPSSLCSLEKLELLDLSRNMLTGEFPNCQENSEPFMKLRILNLNTNNLSGEFPSAFKGRQFVAFVDLSYSQFSGNLPVWIWEEMPTLALLRLRSNMFYGHIPEITTSKQLQFLDLAYNNFSGSIPHSIVNLSAMARTSGYSYFLDIILVGIGYQLYNSEFYWVSFREQVSVSTKGQQLELSSELSHMVILDLSCNSLTGVIPQDIGALVALKGFNLSWNQLSGEIPVTIDQLKQLESLDLSHNQLSGSIPSSMSGLTYLSRMNLSYNNLSGKIPTGNQFDTYDASVYIGNIDLCGFPLPSICTGNTSNQGTHGNSNYRDLDLAMAIGFVINLWWIFCVMLFKKSWRSAYFMFVDELHEKIYVIVAVRCAILKRKFGKK

SEQ ID NO: 71844 - protein, 224 aa, Zea Mays
MSFDMVEKFDKYWKEIQGPMGLATILDRRFKTDFLLGFIETLTDESSQACIEKLGKVKESLYELMKEYETKEDEDNTESSTPALFNSGVLSTISACVASRRPTTMRFKSELERYLEDELVPIGTENFKILDWWKVAGTHYPTLRKVARDIFAIPVTTVASESAFSTSGRVLSEHRSGLTPDILEALMCSQDWLRNKYKGGNEDTASFWSCLQEIEDDTKGLALV

SEQ ID NO: 71845 - protein, 853 aa, Zea Mays
MFILWRKYMVSDSYAEALLMTIHSGRWLEFRRHKGVFQRTRRMVHIIPLASDGDGNHISVNGALQVGSTSNIDEIKLKLNKALQSEDISNGLVQSIHDAARSIELALIEHSKLPKSSWFPKTWLGVENNAWIKSLSYQAAVDSLLKAVIDVSSRGNDRDRDINVFVQRSLSRLLTPLESVIKNELSKREPALYEWYSSDQNPLVVRQFVNIFENDPMFYSATAICLEGEPMNTSESDLSLLMLGLICLAAITKFGSAKVSCQQFSSMVPDIIGRFMDMLLEFAPLSKAYNLAKDIGLRREFLYNFGPRAAVPKLGNDHGLEISFWIELVQKQLLWALDREKIWSRLTTSESIEVLEKDLAIFGFFVALGRSTQGYLSFKGLTDLDDSLNGIVRYLIGGSVLYYPQLSSISSYQLYVEVVCEELEWLPFYNDDVLSAKTDTEGREEVPKGEVISRVLNVCSYWMTSFTKYSSWLENPSNVKAAKFLSKGHVMLSDCMKELDISRNMSNDSGFLEPEEELDTGTELASFDKSLENVEEALVKLENLLQELHVSSSHSGKEDLKAACSDLEMIRRLKKEAELLEASFLAKAEYLEADASSGSLSPAEEGPVKTSSRTNDTSAPQKTGSRVDNKRRPFWDFFGRSLKVDPALADQDLITVANVEKEGMESNDILRFEQLRRELIELEKRVQKSADEAQKEEEMVVAEKTTAPSPGSSVSSRQTTKKENVITKSVEKVKETTTTVLQGTQLLAIDTGAAMGLLKRALIGDELTQKEKQALQRTLTDLASVVPIGILMLLPLTAVGHAAILAFIQRYVPSMIPSTYAPGRLDLLRQIEKVKEMEVAEGSSEDILEELNK

SEQ ID NO: 71846 - protein, 584 aa, Zea Mays
MPGCGVAGRGDVGVSSAARRTPPQGKSRPCLWMTIARGYGRQHELKYCTSPQSKSLLLEARFGRHVTRSTAYLLQNSRSTAMTRLQKSGKFLQPVLDSSRNYLTSTFYNASLKRRVLSRVECFVSSDPINNGWLKPRRSENFTSLESACVQPEYKLPVRTRADCKAEQYEITGSPLSPSDVPADAVMIGDTNEISPWWQEFPKRWTVVLLCFFAFLLCNMDRVNMSIAILPMSSEFSWNPATVGLIQSSFFWGYLLTQILGGIWADRFGGKVVLGFGVVWWSFATVLTPLAAKIGLPCLLTMRAFMGIGEGVAMPAMNNILSKWIPVSERSRSLALVYSGMYLGSVTGLSLSPLLISRFGWPSVFYAFGSLGTVWFALWQSKAHSSPDDDPELSKAEKRHILGGSALKEPVTSIPWRLILSKAPVWALIISHFCHNWGTFILLTWMPTYYNQVLKFNLTESGLLCVLPWLTMAVFANIGGWIADTLVQRGVSVTNVRKIMQSIGFLGPALFLTLLSKVRTPAMAVLCMACSQRCFFTVWPVFKSPRHRTTLCGGTSRTVKHCWRSGRSFWYCCHWLHSSERFLG

SEQ ID NO: 71847 - protein, 125 aa, Zea Mays
MSTQGNCETHDAVVPGKLYFGFNEYCNDENERVQVLTIVKKDEPVDDIVDRINPGTIAGYSEAKGAVGASAATSAVRPAGSRSSSFHGVTRHRWSGKYEAHLWDSSCRVEGRRRKGKQGIHFLTI

SEQ ID NO: 71848 - protein, 60 aa, Zea Mays
MHNSPFQLNNYRKLQAVKVKKSMLLFSLLKKGSNKDRSKIKDSTDQKEPQRMTYESHQTN

SEQ ID NO: 71849 - protein, 102 aa, Zea Mays
MGGAEVGEGAGAGAGAVEDGVVELVDTAGLVDDSGATGVGEVGGGVENVAEGAGEQWSKVETRGEKPDMQSNQMKSVAGLPPQPSLLLLPLQVRLYPYISSS

SEQ ID NO: 71850 - protein, 143 aa, Zea Mays
MLRSQSRMDSTTAAATAAAAAAPAPVLLVTNDDGIDAPGLRFLVDRLVAAGRYRVLVCAPDTDKSGVSHCITWRPALRCKRVDIIGATAFGVSGTPADCASLGISGKLFDGLVPDLVLSGINIGNNCGYHVIPLCTGASRGLR

SEQ ID NO: 71851 - protein, 113 aa, Zea Mays
MGGGRNGCCEVPLSRTRNGCAGCAASGQGRGRADVCRDFGRLARFSRARGRRAVVTAVQGAVGRLAAVRAGRTRWTRHRAVRAASSSACVREQRERRLRERENRGRGTQGAAA

SEQ ID NO: 71852 - protein, 141 aa, Zea Mays
MSLKQHKKCGSFDLDGTFHKYDLYKPMHEMWKDYIRELMDLSPKKKFTENLLSADLHGALLIVAECKAASYKGVNGIMIRDTAETFGIISEDNRFRVVPKAGSVFVLQADRWKFTLIGDKLSPREKLKEDQRQQRAQSLIR

SEQ ID NO: 71853 - protein, 77 aa, Zea Mays
MTYIALNPCICQPAPCYLKTRPGSRQPRAQLLHRPASCHGGHTLLSSSLYSHCVVAFLVLVKLRLGLPCPIPGHVTS

SEQ ID NO: 71854 - protein, 71 aa, Zea Mays
MATKSRSCSRPLSSSSFSSCRSDATCCVKGIPSPCYQTLPMELSRGLWRASRRSPSPSWRDLPTSLRAVRL

SEQ ID NO: 71855 - protein, 89 aa, Zea Mays
MCCYCRWSVPRTSRTSEVWSTRRSRLRRSNRCCPRMSVKAPRPRPCLLWPAKTLRRPLCRWSKEPRRWWRSWRSKAPRPRLCLRRWLSS

SEQ ID NO: 71856 - protein, 169 aa, Zea Mays
MKRAAYFSERYKNMTPVERESRRVRLRLYNKTPRRKDANKECSRKRRALQGDTLNQESIAMEDPLYTPEVVIPEFVMTSFLPTSTQTKDVGSLDMSTEPLRHRHHVLSETRPATLGHRNQQFEAGIARNVATVTEDICDAMEEDDWTHPHPNAELHNNGMVEQGVDHTH

SEQ ID NO: 71857 - protein, 118 aa, Zea Mays
MYGQGPALFLGEFFPLPPLRPCRAAAAASTVRAKIRSSLSAIFGRRRQQDLREGFRVEMAGRKETALDLAKFVDKGVQVKLTGGRQVIYTTSWRATSFCVGIVHLSILGILELVADEC

SEQ ID NO: 71858 - protein, 74 aa, Zea Mays
MGCTKGAPNGCSPRPSNGFFKDNPFEGLPFACKSWREAIRIMLWRSALCHPDFAAEVSIYFVSSSRVCNPSISC

SEQ ID NO: 71859 - protein, 315 aa, Zea Mays
MATLSWWMEWSVENVREAFFSYFGENQHVRLPSTPVIPVDDPKVPLLHTCLHRFKGTLGGRERHRTCFSLRCIIASGDEDLIDRFRIDATFHRFTEILGSWSHGYYFKEEAIGLLFSLLTEKYKLPQSRIYASYFSGDMSSCLSSDDESRNTLQKYIGAERILPSMSKVDFWMPGETGPCGPCIGFFLDCSDNNDGVDSVRNITDGKLVEICRLVFVEFDRQADGVLEPFQAKHVLTGINLECLAAILQKKESHYDLDVYAYVIRQVYWRTGKGFKDYTGKVGAADTDGVDTAYRLVADHMRMIAVTNAPGSQLG

SEQ ID NO: 71860 - protein, 98 aa, Zea Mays
MWHGVQAVYIVLVKKHQPKLAVLGVHLHRLLSSSNCCRRRLTAWEREQNPVLTMYLARWCNRTRTATAARRRGTRPRPCRAGPWPHRRRAQQVPIPSP

SEQ ID NO: 71861 - protein, 391 aa, Zea Mays
MHRTILCFPLVRSPFAYVITGRLFLFPASRNEVLRADNSSLAGDIRKEMKVLNSKLLKAKDRNTKRDIRKELKTLAKEERKRQQLAVTDVLKNADVVLTTLTGASSKKLNGITFDLVVIDEAAQALEVACWIALLKGPRCILAGDHLQLPPTIQSVEAEKKGMGKTLFERLTEAYGEEITSMLTVQYRMHEHIMSWSSKELYNNKIKAHSSVAGHMLYDLEEVTRSSSTEPTIVLIDTTGCDMEEVKDEEESTMNEGEAAVSIAHAKLLVESGVNASDIGIITPYAAQVTCLKMMRNKDAKLKDLEISTVDGFQGREKEAIIISMVRSNSKKEVGFLSDHRRMNVAVTRARRQCCLVCDVETVSSDRFLKRLVEYFEENGEYLSASEYQSS

SEQ ID NO: 71862 - protein, 308 aa, Zea Mays
MAPAPEPTAAAAGRKRKKPHGPSKIIAKKSADPKRAYAKKKKEKHKQKEKKSRLKPAEPDQIAATIGDGVAGATVLLSALMQPSRQLEFLLRSFERASKMRLSPLELDSYSEGCMVQLAEGAAQDVESFGDHVKGVFGSSWKEELCEGNHIDGEIAVGSPTLLVISSSALRSLDLLRGLKMFTKECRPVKLFAKHLKVEEQVAMLNARVNIACGTPSRIKKLIDMEALSLSRLKLVVLDMQKDAKSFTLFTLPQVSNEFWDLYKGYLDPKIREGNMKICFYGAVSERDITKTFSLADTYKLNKGTLYI

SEQ ID NO: 71863 - protein, 58 aa, Zea Mays
MRKRLHGHLRFLQKIRLSLLIHSITLSGSPRMKLSSLEYAPTLAKLVFIFLTHSTDFS

SEQ ID NO: 71864 - protein, 199 aa, Zea Mays
MPFSPRPVSRSSSSLLHGSKHGRRCSFFFLSLCSLGRQQPWPTSTSMEQAPPTAMAPFPVLQRPPCHLPSHGRELHPRQWTLREIPLAPLFSQPCSSLFDFHGRPAPCPRRPGIPTAAHPLPAPPSAPWLQEASPWLTHRWPAALLAPCTLSSKKQRPYLLFPAAPPNRRAVGARQNAQLHFSMAASISLPRLPPKDSA

SEQ ID NO: 71865 - protein, 179 aa, Zea Mays
MMFLVRRKCIRNLVLLKRTRQRETEEMKPYEGGTTNSDESDHIDSGDQNTDQPCEDYVPDEKRVKYDRINPSMQPGSLYPNMKEFRIAMRQYAIKHEFELGIDVTSTTRYVGYCKGGDCPWRIYAREEKKGLPTIVVAVLHDVHTCTSSGKRKTTTPSSGWVAFHAIPLLMKKPQMGAK

SEQ ID NO: 71866 - protein, 140 aa, Zea Mays
MAMVYTLVSSAKEWLSEKYGQNGGDEEPEESEAEKEEVIIPHGEAVTVESFLAWRERFEAELALQRAKLMPDSALTATKEKKLTGRQYFESGRHAVKGASTVADEDEEEEEDIDFDDDFEDDEEDMLEHYLAEQSGKSTA

SEQ ID NO: 71867 - protein, 467 aa, Zea Mays
MSAVSGELISLDEILSSRNLEMNSVLGRITATTQELAHYHSGDEESIYLAYSDFHSYVVGDLACTKELNRWFSKQFEKGPFRLVAEEGKSKCSWVSLDDITNCLIRGDSEKSHHHQRVAELQRLRSIFATSERQWIEAQVENAKQQAILSILKAQVSSDEAHIHRDIHSLRRKGSELAGELSTLSQKVQALVSETIPCLCSELAQLQGTYILQGDYDLKVMRQEYYINRQKTFINHLVNQLARHQFLKIACQLERKNIASAYSLLRVIESELQSYLSAVNTRLGHYNSLIQAASEVREQGAIDDRDTFLHAVRDLLCIHSNVQATVPTYMSAHALVQQISALQSDLLSLQSELENTLPADRKRCINELCTLIQTVEQLLFASSTTAEPILTPWPLMRALDDMENANAQVEVSVEEVTKARTQKIKIFENRAHEVGRERQIFVDFFCNPERLKNQVRELTSRVKALQD

SEQ ID NO: 71868 - protein, 162 aa, Zea Mays
MFLKRWTLQIWRLLTSFFFLAPFSMKFGIRLLMIARYGVMLEKGAFDKRTADFLWMMIFGAISLLVLSIIPLFNSFFLGIPMVSMLLYVWSRENPNAQINIYGLVQLRSFYLPWAMLLLDVIFGSSLMPGLLGIMVGHLYYFFAVLHPLATGKSYLKTPKWT

SEQ ID NO: 71869 - protein, 63 aa, Zea Mays
MAGTTSGEVPRIANGVDELRQGTMASGGAAARVGRGSTVGAREQSDGVVASTPARFRRGGGSA

SEQ ID NO: 71870 - protein, 361 aa, Zea Mays
MEMVECSLVATLAPRPLPGQVRKALPRPAAFGARARLRVRSVGREEPLHPQQTAVRASGPDHGGRALGQAAVGFAAAAVVSLTGFSGDVSPLPTPPARAESLTVAFPVSKAREVNRVQRTLVETWGLIRETFVDPTFNHQDWDQKLQQTMVEIFPLKSADAAYSKISGMLSTLGDPFTRIISPKEYQSFRIGSDGNVQGVGVFINKEPSSGRLLVMDCIQGGPADRAGIHEGDELVEIDGKSVSGLDGEAAAQRLRGRVGTTVKVKLLDGTDDERGGGLRQKEVQLSREIINLSPLSTAIISHRTDDGHECKTGYVRLASFYQTAAAEMENAVKRMEDIGVQSYILDLRNNPVRRFSKSWS

SEQ ID NO: 71871 - protein, 68 aa, Zea Mays
MATPKRQQVVTNQSTNISPVPVTRRQLALSMLDESTSQELATPSRATKSPSKPTSRIARKITPRKFKK

SEQ ID NO: 71872 - protein, 270 aa, Zea Mays
MSNSGRWRRRTRSVAPSPATSSPSSPGLREAQPFRLPQWKFSQVLGELPPAAEARRDGAPRPQDDDDADEISAIEFDGRGEYLAGGDNAGRVILFRRTDGDGDDARPRAELERTDRAGAPPPRYSYATEFQSHEREFDVLDSLDISERIKKVRWCARPNSSLLMLAANDRTVKLWKVSEHKAEAPKKGNGRPSWGTAALSAATKLPRGCSSAEPDERPEKQAMSETATLRNAGESSAALTSSTSTPSRPTVTGRRWCPRTTCGSTCGMRR

SEQ ID NO: 71873 - protein, 57 aa, Zea Mays
MPSAPPARMLSSTNSKVPTGRLLGTGERAVHDVDSRLPGEGQPPQLKVTPITGMYCL

SEQ ID NO: 71874 - protein, 188 aa, Zea Mays
MPSACSFDSHILGAPIRRGHLSQKSVMKRKRSSKRQKAKLVMESLKFYCMASEKKQSNPMREMKVQKLALNISVSESGDRLTRAAKVLEQLSDQSPVFSKARYTVRSFGIRRNEKIACYVTVQGEKAMQLLESGLKVKENELLRRNFSDTGCFGFGIQEHIDLGINGYHKKYTSRSSKVQVTVLFRHI

SEQ ID NO: 71875 - protein, 349 aa, Zea Mays
MAAASPPPSPPHAKRPKMSSSSDPEADAEPTSASAAVEGADPAQRRPRYKRRKVAILLGYCGAGYQGMQKNPGARTIEGDLEEALYQAGAVPEADRSAPRRYDWARAARTDKGVSAAAQVVSGRFYVDPPGFIDRLNAQLAPQIRAYGYVRVTNSFNAKKFCDRRRYLYLLPVFALDPSAHPDREAVMASMGSGSELTKCLECSERGRKIPGVMGREGKLPSPGQNGVDAPVEGSSHDESGTLGDAKCDHTSSDGNNPFAHGEVGSNSKEKPDLPVSGDRTEVANAKMGSNGDGAVVSSVQLMQIFILGTRRRNLSLQPLKIKLKVWNLRRSMEKRNCQLRVPFLTLMK

SEQ ID NO: 71876 - protein, 88 aa, Zea Mays
MLLSKALRMQQDLEDKKNKIIIEGLENKIKDYEASLEKKDFLLQAMEGSLAEIQAENAKLSEELVQKSESFQQEKKDLQTKYEAEADK

SEQ ID NO: 71877 - protein, 518 aa, Zea Mays
MQRRVDYNSLPEPAPRELPMNEDPSLAEQKVREESERLRQQEREQIAEKRKCDMMLHARVAAKAEEKSMELLYIHWTEHHKRLSNFLSCLSEYAVYISYMNAGCMVISGDSYTVYAHSKIICHQFAMFCPTEVDYTISKKNMTFQIYCCPRTTAELEAHVADTSLVSADAPRVLADTVLDISGGERAFIEADEAKELLSPLTKPGNSYKRICFSNRSFGIGAANVAGPILDSVKNQLTEVDISDFVAGRPEDEALDVMRIFSKALEGSVLRYLNISDNALGEKGRKLRKLYLSLFLQLKLKVLHFHNNMTGDEGAMYIAEMVKRSPNVESFRCSATRIGSNGGVALSEALGTCTRLKKLDLRDNLFGVDAGLALSKTLPKLPDLVELYLSDLNLENKGTIAIAKALEQSAPQLEILLKMLPKYYNHVRAYDNTLITKKFGVHRITLKGGRKVRFVVMGNMFCTELRIPRKYDLKGSTQGRSTKKQNINENATLKDLDLSYVFHVDKPWRDTLFRGAYP

SEQ ID NO: 71878 - protein, 66 aa, Zea Mays
MLMTVYAHTKACCEYLKYFPLRISKRLKDHPPLEQRQLILVTKLSFKLFDNKITSSSLNKDARMNV

SEQ ID NO: 71879 - protein, 578 aa, Zea Mays
MTEWFYVKSDLTIREDIKGIIMRPIWQSFGLRRPKVEMNEVAEECQRAFGAVCSFIGTRDLVQEHIAFRVWPLAENWEMPQETVKEADEGGLIRLKYTFKFGDKFVEQDDDWLKSIENLSDELLGAYSKAEDTAMSAAFGGRKKKRLNRVFDAIGFVYPDYCYPIRRQKRKSTTSAKEEAAIAPSEPEPKRKKVKVLTHRPRYIEPASVPEFTGGTPSAAEAEKPAEPTLLPEVAETAEVPTKIELEQSEILLSEMKEKAEAPSTEKMEEVKEATEGSKTSEVLSPAANIDAVKNQKVPAVTPKRKRMANVLDVLETIKSSSTPPKKAAVIPETTTEISGSRAPGQETEAEAGPSEPAKIKSLESEAEKITKPTFVEETGVIAPEASPNVRDYILRHASGKKLSEKEEQEAQHYAQKLKYPKGALIFNGSGEEDFLYCLPDSKEISVCREMSRSFGFPTLEDGLSVLSKNDLADSLAYNSLKVRQMKSLYFLLSSKFFVCLNLLTQTYFSLQGLILSNALRAQKDAEDEGCSIALSNLRSEVIELRNEGLEKDKMLYSLIHKIKEDEAAFKGQAEAQK

SEQ ID NO: 71880 - protein, 68 aa, Zea Mays
MTTVSRRTVATHLAGVSSSSSVSNATFALLLQSLLTRMISTDFHKECRHLRSHPLLRLTSLMVFHRVT

SEQ ID NO: 71881 - protein, 102 aa, Zea Mays
MRRARSCSCSFAKTPMILPSSVKSVPSGGAKPRGGCGCPSGPQVRRASSSQVQRTSSSVASWWVEWVRARALPFFAASSAAFAASAAFELALLGAIAGGCSK

SEQ ID NO: 71882 - protein, 567 aa, Zea Mays
MRAGGGAPPRHAPLSPTASATATLVPASVAMPTPRLVHLRHLLSFRSALPRPLGPNQSHPLPGSVHPSLLLPRAMAGVAYAGLATGSAEYEEVLGCLASLITQKVRADTGNRGNQWELMSKYVQILELEESIAQLKVVHVAGTKGKGSTCTFAESILRSCGFHTGLFTSPHLMDVRERFRLDGLDISEEKFIRYFWWCWKTLKDKTGDGVPMPAYFRFLALLAFKIFSDEQVRAPVVCGITSLGYDHMEILGNTLGEITREKAGILKKGVPAYTVPQPEEAMSVLMKRATELGVSLQVVHPLDPQKLEDQPLGLHGEHQYMNAGLAIALANTWLERQGHLNRLHVKHSGTLPDQFIKGLSSACLQGRGQIIPNSQVNSENDRDSSLVFYLDGAHSSESMEMCARWFAHATNSDGIQPGPSEQPHTDRDSRKFLLFNCMTVRDPQRLLPRLLDTCAQNGLHFEHALFVPNQSQYNKLGSLASPPSEREQIDLSWQLSLQKVWGNLPHHNKGLNDVNSSGATSVFESLPLAIKWLRETAQQNQSIQFQVLVTGSLHLVGDVLRLLKNNK

SEQ ID NO: 71883 - protein, 989 aa, Zea Mays
MIDDEESQGIKKVHFRDSFSQHPIVTYKRRRQQKPQTQQQLRQPPPSLQQHPEPQLQVKLEPKTEDVPEQQFPILRARDIGWEHAVDLDGNKRRWQCKFCSLCRSGGVTTLKAHLIDDSCPNVPKEISKKVSNFIEEKRATRLLLNNYVFNVDEDFNTILQEGTVEYVNEQQPSRKATYVQTLSKCAINEMLKPCRKSEFNTRKHIIIVDKIGRHWKCRYCGMDVYGKKFQLHYHLAGAFRQAKCPNVPREVFAKARQHVLTKKMLKKSKAEQQIPSSPHILAQSGEERQNNDPFCGNQSQLSINNEPREVHNYPAVLRDSAWEHSLIYEKENGHWKCKWCSIEGDHGLTRLMWHLVGWQNRPQCPNIPKDVAEKMKDQMMSKKEQKARSGLFDGNGCCEVLCSSNSSQLDQNHLTARIHDRCSSQAFDHANSELKGCNMLSNTILSQQSSNPQVHHEDPQVCHEQERKEVATSSEPGCEQGQRMQWQSQNKPMMEGPHDNGLCGDTNQLEEQKSGFGISDCWRYVLDGQMHLPDVQEGAGIGTCIRDALLYGCAEFGTVPDKMEMDCDKTVDANTAKCQNILKDVLRSENFALLCSVLCRTVHQDGERTRYFDFGVIDSRMKNGNYGPEPELFVHDLKLLWEDLKVAGQDIVHLANNLSSLTEDSYEKLVGRERGSDDDELNEAVVARSEPKNLVQPNASVPLTSQGFNQLLDQPGPSDPSVVYKDSICNRCGKVAGAGSVLKCYRCMLPCHISCIEATGSPISTGRWCCKNCSAGTKEPVEGDMVLAHGNPNCLHESCVVCDRLAACRSPKCDNSRALVISSVDPEIDTCYSCKICGGTEEDEKRFLICGNVLCRYMYYHIGCLKSMQISTSVERGSPCWYCPSCLCRVCLCDKDDDLTILCDGCDEAYHIYCITPRHTSIPKGQWYCSSCSVERAEEGMRQYERRTLKLHRKEDAGLQSWNFDGVDLLLSAAEQLRIDEQLETRTD

SEQ ID NO: 71884 - protein, 104 aa, Zea Mays
MRSRSRSPVRRHDRGGYHRPSPRRSRSPAEPRQNVNDRPRSGHGGGDPDHSPPANRSRSKSRDPLGPRSPDAAPAKRESSRYNRRRSSSSRSSSPDGNKGLVSY

SEQ ID NO: 71885 - protein, 63 aa, Zea Mays
MSCPMVKVWQRRLCVARRLMMSWPPYSNIWSINCDKLSCVNCIIGKLGCDGFSAGTLTSKTYV

SEQ ID NO: 71886 - protein, 240 aa, Zea Mays
MPGRLLSVRIPSLAKLGAPSRCAKSMASDTGKKLIQIDVSSDTVCPWCFVGKKNLEKAMEQSRDKFDFEVRWHPFFLNPDAPKEGVRKSDFYKAKFGPVQYERVISRMAEIFRGLGLEYDMSGLTGDTMDSHRLIALAGHQGYDKQNALVGELFLNYFCEGKYIGDKQVLLDAARKVGIEGAEELFQDPTKGVDEEELKKYSSGISGVPHFVINDKYQLSGGQPPNVFMRAFEMAAKDGA

SEQ ID NO: 71887 - protein, 65 aa, Zea Mays
MTRRRTTATWTVLGMVESTQSSKSTATRTSWDNLTISASWSAGKLGRRSQKNWRAYAGREADAGE

SEQ ID NO: 71888 - protein, 192 aa, Zea Mays
MKKFYGDYYQVTLEEFMSVLRKLYSFYASETPRPTKTTEHIIPTNSSQKRNVNLELESYLYDDLPDRDESNELDKYMAEPLIKQDPFDILAYWKNQTDKYPILSQIARDLISVQVSTVASESAFSAGGRVIDPYRNRLDPEVVEALICTKDWINAVRKDSKSVLSIVAELKPLETNPLSPNASHLMDDEEHG

SEQ ID NO: 71889 - protein, 166 aa, Zea Mays
MHQGYPKETLVRFLKAREWNVAKAHKMIVECLNWRIQNEIDSVLERPIAPVDLYKSIRDSQLIGLSRYTKEILLYNFDGGTICSVVILKEWLGIHRVAAAEISKGLPIFGIGVGHSTYDKASAIATAKIIKVPGLKLSALSQIKVAEFSDLEQRLSLNFQSSFLDS

SEQ ID NO: 71890 - protein, 70 aa, Zea Mays
MSNYCATIRKVEDKFQGLEFHHIYRERPQHGNYRFIQARIELSIDSTGCLRPKRYNNPVSRQGQGKNVKQ

SEQ ID NO: 71891 - protein, 573 aa, Zea Mays
MRGGAMKALRRSSTSSAPSPRVPSSPRSYSWIHRRSLLVTSPASPATSSVSESANLPAEGSDSAPASVVAASSSPSLAASSPNMEWGGIKSPWSRRKRKRALTCQHWNRLFSANGKLRDGGRKFLKKVRSGGIEPGIRAEVWPFLLGVYDLNSSEEDRNTIKIKKRKEYEKLRRQCHRILHCNRENGLNVINEFMNEDFSDGAEGSESPYSNGVSKRVCVMPKELKSLGSKAEESESSNWDAVKCIDEDITSVDPCLVESESSESESSYEEDPDRTPVSTNMEENCGPKPKFARTASSKSEIIISDRTPEDFATWQRIIRVDAIRANTEWVLFARNQAEVSKEKALQSAISVGLKDFDHLEPYMIYHAARLVALLEAYALYDPEIGYCQGMSDLLSPIIAVMEEDHEAFWCFVGFMRKARHNFRLDEVGIKRQLKTVSQIIKRKDSHLYRHLQKLQAEDCFFLYRMVVVLFRRELTFEQTMCLWEVMWADQAAIRAGIGRSTWARIRLHAPPTDDLLLYAIAACVLQKRKLIIEKYSSMDEILRECNSMAGQLDVWKLLDDAHHLVVDLHDKI

SEQ ID NO: 71892 - protein, 78 aa, Zea Mays
MAGASDSVRRRTGLSGAPCDSTLPTAIFGGWSYKYPNHPTFNGIQVSTLLHLTRAIAFNTRHTKEIKSSPNSTQSFSD

SEQ ID NO: 71893 - protein, 517 aa, Zea Mays
MADGDPEPAPAPAPALANEKLHVRAAAYVDETRPPPPLEPSGGPDEEKRPPEEVEAEVEMHPPREPTGEPPVDRPGVEVVADMKANEVEKERGDRAKEKREKDKGKGKEEKEKVDEEAKGKVTAVMKVDGTEKEVKPTRRPAGASAETPILAVPVVAVPCFIAPPGFAHSPSVTEGNICTPIADKSFSSDSKSHHVVNMVADGFNWRKYGQKQVKSSDNSRSYYRCTNSGCLAKKKVEHFPDGRVVEIIYRGAHNHEPPQKTRFAKERVTPISVPSGGETLRLVNTEIVESSTPTCELERSAISETSEQHLFCSSDCEGDAGNKSEDEHPSAEALPKRRTLEATAPNLTPVRRTVREQKIIVQAGKMSDGYRWRKYGQKIVKGNPNPRSYYRCTHGGCPVRKHVEKAPDDVNNIVVTYEGKHNHDEPFRSSSIPVSVISPSATATEQPNTSSTSDERPPTITQKDANSESDKETTLKFGGEKALESAQTLLSIKTNSDDMKNSVLKETSAAVPVQNN

SEQ ID NO: 71894 - protein, 79 aa, Zea Mays
MPMFMMPCSSFSCCNSRGVTGEVPDHPCMCAGPSAMHRTSYRVWPPVCACTQRWSGPRVVRGFGGRSLRWRPLAHRTVR

SEQ ID NO: 71895 - protein, 209 aa, Zea Mays
MRKNTAPCPKLHTCSGLDSHNEQKHWHSQCHYKRNSGSTSAGTNNPIRWGKPAEQQKTDGRLAVARSGSNNNDPRSGWPNCSSDGLRGGRCCSLALAYADARGARTSTKSQRPEARMVAVIPSAMGTSRAASTPAPTTGAVSPPADPHSDPPGRVGHRPPRGGVVPVQRQDRPRTRTPPWQRATSWAVLPSARRDNRLRGRRGHREPSR

SEQ ID NO: 71896 - protein, 666 aa, Zea Mays
MAQGAGRDPEELFEELWRACAGPLVELPQTNERVFYFLQGHLEQLQEPTDPALLAEQIKMFQVPNKILCKAETETDEMYAQITLQPEPDETSRPVVHSFCKILTPSDTSTHGGFSVLRRHANECLPALDMSMPTPTQELITKDLHGSEWRFKHIYRGQPRRHLLTTGWSTFVTSKKLIAGDAFVYLRSETGQQRVGVRRLVQKQSTMPASVISSQSMHLGVLASASHAIRTHSIFLVYYRPRLSQSQYIVRLNKYLESSKIGFDVGMRFKMSFEGDDVPIKKFSGTVVDKGDLSPQWQGSEWKTLKVKWDEATNLNGPERVSSWEIEPFDASAPAITMPVQPSMKNKRPRETAEGLDIHALEPAQEFWLSGRPEQHEKTSVSSSEPKHQVAWTSERAGYSAMSSSICQNSAVTGSWFKGFNSSGSHPSLPEISQKLFQVTSNDARVPPWPGLSAYHADEPSSKLSCNTALCSYQTEEVAPRFSNAVEEEKKEPGMFRLFGVNLINHARSSATADKTSVGAGETSARAAGSFEDSAQLSRVTKDHTHMVNGSPREIQSHQSCSGRSRIKVQMHGNDVCRAVDLGNLDGYEQLMGEVGEMFEIKDLGSKEKEEWKVTFINDENETMEVGAVPWQEFCQMVRKIVIHSIGDRGHMEACPCLGQDGKRDY

SEQ ID NO: 71897 - protein, 601 aa, Zea Mays
MGTCGRRVLGVWFFFWFLLTLEQCTSLNREGAALLRFKAAIEADPYGALLDWNQESLSPCTWFGVECSDDGLVMSLSLANLGLKGVLSPELGKLMQMKSLILHNNSFYGTIPREIGDLQDLKMLDLGYNNFSGSIPSELQHILSLEFLFLEGNRLSGRSPVGVHQLTRICEHENQVPTTTTRIVTIKIRRLLMSKQKDFKMVNITGHPIRFPLNSPAAPSPSDPIPPPPAPPSPSEPIPPPSAPPSQENKSKSSATLYASIGAVIVFFMVASSALCFFYYCRKKTSTVVPLSANSSSRQLQTTTMEGITLFRRSELETACEGFSNIIDTLPGFTLFKGTLPCGAEIAVASTSVAYAGGWSAIDEAHYMNKVGALSKVNHKNLLNLVGYCEDEKPFIRMMVFEYASNGSLFERLHVKEAEHLNWQSRLRIAMGVLYCLQYMHQQNTPVTLKNLNSSYIYLTEDDAAKVSDISFSVDKREDDEYDAPDEYSTVYKFALLLLETISGRRPYSEDDGLLVLWARRYLTCASPVMGMIDPTLNSVPEEHARALSELIRLCLSEDRRQRPTMAEVTKRMQEITGITQDQAIPRNSALWWAELEIMTS

SEQ ID NO: 71898 - protein, 408 aa, Zea Mays
MAGSVGKARAALRSSPKRYSGTDPPLSLAGPTLADLQRTAELEKFLVEAGLYEGKEESAKREDVLSEIGLIVKEWVKQLTRKKGYAEQLVEQANAILFTFGSYRLGVHGPGADIDTLCVGPSYVNREEDFFVTLHGILAEKEEVAELQPVPDAHVPVLKFKFRGISIDLLYASISLSVIPARLQPFTHPPAASPPLLPASIRQPLLSNCQPPPADFDISQGSVLCDVDEATVRSLNGCRVADQILRLVPNVENFRTTLRCLKYWAKRRGVYSNITGFLGGVNWALLVARVCQLYPNAVPSMLVSRFFRVFTQWQWPNPVMLCAIENNDLGFSIWDPRKNPRDRNHLMPIITPAYPCMNSSYNVSTSTLRVIMEQFQFGNKVCQVLPENLQLIANVLGMVSLRIFYAGN

SEQ ID NO: 71899 - protein, 485 aa, Zea Mays
MGWLSKIFKGPVNRVSRGHYNGNSHEGYSAQHTKSYGVHGNEDEDMDHAIALSLSEEDQRKGKTIDIGHNLAEDEQLARALQESMNDGPPRQHIPVEDVNSESTPASILPSNIFRTSGLRVCAGCRSPIGRGRFLSCMDSVWHPECFRCYACDRPISEYEFAVHENHAYHRPCYKERFHPKCDVCSSFIPTDKNGLIEYRAHPFWMQKYCPSHENDGTPRCCSCERMEPKDSQYITLDDGRRLCLECLHTAIMETNECQPLYIDIQEFYEGMNMKVEQQVPLLLVERQALNEAMEAEKSVHHLPETRGLCLSEEQIVRTILKGPIGPGNRIIDMVTGPYKLIRRCEVTAILILYGLPRLLTGSILAHEMMHAYLRLKGYRTLSPEVEEGICQVLAHLWLESEITSGSGSMSTTSDASSSSSTSSSSKKGAKTEFEKRLGEFFKYQIETDSSVAYGDGFRAGMRAIERYGLRSTLDHIKMTGSFPC

SEQ ID NO: 71900 - protein, 131 aa, Zea Mays
MAVTSGAPNDNGWDVGAAATDDEHRVDLEVKHKDTGTRDSPAPIAAAAPPSDLLPLPAPPSQSRVAGKLGPSDPKHLIYAGSKSKHIKAAPAAPGKNRRPPLSPPAPAVNRGRGSVRTPLGCAFGSGLHIC

SEQ ID NO: 71901 - protein, 421 aa, Zea Mays
MEQFLKRCFYQSGQYNSEEGFAELDRKLKEKEAGRLPNRLFYLSIPPNIFVDVVRSASRTASSSSGWTRFIVEKPFGRDSESSGELTRSLKKYLVEEQIFRIDHYLGKELVENLSVLRFSNLVFEPLWSRNYIRNVQLIFSEDFGTEGRGGYFDNYGIIRDIMQNHLLQILALFAMETPVSLDAEDIRNEKVKVLRSMRQLKLEDVVVGQYKGHSKGGKSYPGYADDPTVPKGSVTPTFAAAALFIDNARWDGVPFLMKAGKALHTRRAEIRVQFRRVPGNLYRRNIGADLDKATNELVLRVQPDEAIYLKVNNKVPGLGMRLDRSNLNLLYSERYRREIPDAYERLLLDAMEGERRLFIRSDELDAAWAIFTPALRELEDRKVAPELYPYGSRGPVGAHYLAANYNVRWGDITSDDDGAF

SEQ ID NO: 71902 - protein, 342 aa, Zea Mays
MRSDVIMSMFMNELYGFQLDNHRWYPLELRKDKPAKIKARNIKRKESTNDVEANIIDDEGDEVMVDVEEAIEGQPEVNGVSNQLIKTLNITKDGSSRSIDVLSDSTAQESFLEAVKPSGRINACLAVGKDMLYLYGGMMEVKDREITLDDLYSLNLSKLDEWKCIISASESEWLEISEEEDDDDDDETDDDENEEGDASQTDEDEEESDEDAAKNVSSAVSLLKGESKTMRRKEKRARIEQIRVILGLSDSQRTPVPGESLRDFYKRTNMYWQMAAYEHTQHTGKELRKDGFDLAETRFKELKPILDELAVLEAEQKAEEEASASTSSKRDTKKPKQKSARR

SEQ ID NO: 71903 - protein, 217 aa, Zea Mays
MAFAVTLTPLRATAVLAGWRRRPGVTPPRFAVVLATSTGVGGERTPPTFRRLREELLQLHAEADLTQSKANSERVRLVRLTEAAENLKKRAATSVRMGKESEAVDLLVQKKKLTKALENIKERIEVLDMLSAKISEVISMKQNMLIEYALRPETSNGEDSDDKIRVFSSTVNVGTNGAGSSDSHPKSVEKESFELRNEAHAIASMADDAEQNEIIGI

SEQ ID NO: 71904 - protein, 241 aa, Zea Mays
MRHHLHIEERQVADMCLDLYKEYGTTMAGLKALGYEFDNDEFHATVHGTLPYHNLRPDPVLRTLLLSIPQRKIVFTNSDKAHAEEALCRLGLQGCFDGVICFETLNPCNGPSAFRDGNGMLFPDETFPDSADLNESDGFRPISPILCKPSIEAMEAVTRIANVDPKKTIFFDDSTRNIASGKAAGFHTVIVGRPTLVPGADHALESIHNMKEALPEIWDGQDRSESDALLSPTAVETPVAA

SEQ ID NO: 71905 - protein, 61 aa, Zea Mays
MPFVECHTRQRGFGEPTIGNCFFDECFCKAAMTVASDDDRDFVECWLRGTRQIKLMWAFHT

SEQ ID NO: 71906 - protein, 829 aa, Zea Mays
MAESSSRQAAEMVEKWMAFPSGSDAGSGFAFPAPRSVSGAGKEIVELASPSTATATATATTTASAGNRQASFQRGRDSGVGSTRSSMDGARASGDSSMPRVSQELKDALSSLQQTFVVSDATRPDCPIIYASAGFYTMTGYTPKEVTGRNCRFLQGPDTDMNEVAKIRDAVKTGRSFCGRLLNYRKDGTPFWNMLTVTPIRDDNGKVIKFIGMQVEVSKYTEGLSEKRMRPNEMPVSLIHYDDRQKETAMSSITEVVQTVKHPRARSEGEQEPVEPAPPVMASPLVAPGTPSGGASLKSPLWDVKKEDSRLSRKSSRRSSLMGFKMGKRSSIGSKDALPAEVEAPAPAPAPPESTTEKQRKNSWEQEGRERDIRQGIDLATTLERIEKNFVITDPRLPDNPIIFASDSFLELTEYTREEILGRNCRFLQGPETDMSTVDKIREAIREQKEITVQLINYTKSGKKFWNLFHLQPMRDQKGELQYFIGVQLDGSDHVEPLRNRLSENTELQSAKLVKATAENVDEAVRELPDPNLRPEDLWDIYSRYVSPKPHKRYNSSWIAMEKIIKSGVKIGLKHFKPIKPLGYGDTGSVHLVELQGSGELFAMKAMDKSVMLNRNKVHRACMEREIYSLLDHPFLPTLYTSFQTPTHVCLITDFCPGGELFALLDMQPMKLFREESARFYAAEVVIGLEYLHCLGIIYRDLKPENILLQEDGHIVLTDFDLSFLTSSKPHVIKHSTSRRRRSKEYLPPSFVSDPATPSNSFVGTEEYIAPEVITGVPHTSAIDWWALGILLYEMLYGRTPFRGKNRKRTFHNILHKDLTFPSSIPSCG

SEQ ID NO: 71907 - protein, 450 aa, Zea Mays
MEVHLRKVMHRSRFMRKSSIIPAITNRIKRDLIHNPLHLIFSVDFLGVTKSTLSSLSKGFAELSTDGQFLQLRSKQVWSRRITGVGDGLVQGTEAFAQGLAFGVSGVLRKPVESARQYGVIGIAPGIGRAFVGFIVQPLSGALDFFSLTVDGISASFMRCVNILSNKSVPQRIRDPRAIHRDGIVRDYDKFEAAGQMALYLAEASRYFACTDLFREPSKYAWSDYYEDHFILPSQRIALVTNKRVMLLQCLDLDKMDKKPSKILWDVPWEEVLSLELAKAGYQRPSHVIIHLKNFRRSENFVRLIKCNIDNEREPQALSLCCSIRKMWRSHQAAMKVIPLKVPSGQRHVYFVSDDDKKESHSLSRPLLSSGGTSTDVEQQFINNTVHFQKMWSSEPEIQSRCKLVAKQIADDGRVFSIWRPLCPNGFGEIVLRITRALYQYGFQGHRGDT

SEQ ID NO: 71908 - protein, 103 aa, Zea Mays
MFSDEGCFAQSMLLSKALRMQQDLKDKKNEVIIEGLENKTKDHEAALEKKDFVLQTMEGSLAEAQAKIARLNSELLTKSKNFEQEKKNFDAKFEAKVEKSSNL

SEQ ID NO: 71909 - protein, 75 aa, Zea Mays
MRPWRREKNRGALEQSSRVHEKKSERRPGCMRSGRAGAGTERHGRAGNREQDAERICEELGAARAHGAGARREDS

SEQ ID NO: 71910 - protein, 108 aa, Zea Mays
MNGKVGKGLLKDENAQKLALQHWLEAIDPRHWYGHNLHCYYNCWLHSESKQPFFYWPHLKKSYISLRKNSKLKERKLLGSRKSCKHNYKLNRPHLKKTKVCCARPKRK

SEQ ID NO: 71911 - protein, 84 aa, Zea Mays
MEERGHRGEGEVGHQLQMPLMASVSWERQWGRKEGRSVAVFGMRSQAATTWEAWSRARKPMGRGHGCPGRSAARDGAGARLRGW

SEQ ID NO: 71912 - protein, 91 aa, Zea Mays
MNVGDLSDNGFKLLNLIALLSYTVHVHSHLRPLMARIGARGPDNLGGLSQYKYLLCNNNIYYTMFHYFMIRSLFNLRWLVLLMCSSLSTKI

SEQ ID NO: 71913 - protein, 60 aa, Zea Mays
MVVDRWLLPKDLRNGHVFDRWRPMSGRQQAASLSPGVRRVLERVLVSWQLATSTHELIAI

SEQ ID NO: 71914 - protein, 254 aa, Zea Mays
MRSGVPNFCAVALALNDMGYKAVGIRLDSGDLAYLSVEARKFFHAVEKEFVVVGFGKTSITASNDLNEETIDALNKQGHEVDAFGIGTYLVTCYAQAALGCVFKLVEINKQPRIKLSEDVMKVSIPCKKKCYRLYGKEGYPLVDIMTGEDEPGPKIGERLLCRHPFNESKRAYVVPQHVEELLKCYWPGNSSNSREELPSIHEIRTRCIHHLDRMRPDHMRRLNPTPYKVSVSAKLYDFIHFLWLNEAPVGELQ

SEQ ID NO: 71915 - protein, 65 aa, Zea Mays
MGLEVGAAADLLKGEVVRSYLTSAAKILHPSIFSARSGRRRVVFCRAPPALAAGCSSSGGRGKGK

SEQ ID NO: 71916 - protein, 50 aa, Zea Mays
MTIKPMRCIWSEQQRWRSYTRYSAKSLHVLKHLLGHHPHLQLHTLPPLFF

SEQ ID NO: 71917 - protein, 542 aa, Zea Mays
MLHYSFPPFSIDEVAKRGGLNRREVGHGTLAEKALLAVLPPESDFPYTVRVNAEVMASDGSTSMASVCGGSMALMDAGIPVREHVAGVSVGLVSQVDPATGDISNYRILTDILGLEDHLGDMDFKIAGTRKGITAIQLDIKPAGIPLDIICESLEPARKARNQILDRMDQEISTARGINDGSSPRLATLSFSNESLRKLLFHRKKIEQETGARVSISDGTVTIVAKTQEIMDKAIEKVEFLVGREIEVGRTYKGIVSSIKEYGAFVEFNGGQQGLLHISELSHQPVTKVSDVVTLGQSLSLRCIGQDMRGNIKLSLKATLPQPRIKKDLKNKDPLPSEVTGWAAVENMSSVDVDAQLSSTEHENGTTEEAAAFSTPSVIIRSAADCDAQDDANGSKKRAKVAKSSPRPNKPASECHDVRKATAKKATGATTKKTKKVKIEESVSNGLETSGSDVPEQSADNTSDQNQSPTKFQSGAMKLGDVVTAKVYQIRAYGLVLELSDGVRGMHKFEANGLKEFEVGQELVVKCSSFNAKGIPLFSLLD

SEQ ID NO: 71918 - protein, 117 aa, Zea Mays
MLTAFSTFILFVLIDHILNRYVGNIHLQVTDAVLQEFFQSIGPIEGCKLIRKEKIPTSRVTRRSSLAVVAAVLPPLVGPKRGRGEAAGVQTSTQVEVLARMTRSRSIDICIIISSLY

SEQ ID NO: 71919 - protein, 56 aa, Zea Mays
MFLFGNVLLRSDRRRRTTRRIRSSIHVCHYVVRNNHTGSPHQDSPRANGFVHSSVA

SEQ ID NO: 71920 - protein, 473 aa, Zea Mays
MAASAKGRLVPVLAVAAALAAVLLYRAPFSKSLGGEGCSLLPHDHFWIASDRVVTLGRVGPAAVEVKGGLINAIAVGDYRSFVLRRPLLDYGDAVIMPGLIDVHAHLDEPGRAEWEGFSNGTRAAAAGGITTLVDMPLNSFPSTVSEETLKLKLEAARDKLYVDVGFWGGLVPENAFNPSALEGLLKAGVLGLKSFMCPSGINDFPMTNSTHIEEGLVTLAKYKRSLLIHAERIPEAEDHDLQEDELDPRSYMTYLKSRPPSWEEAAIRDLQRAMKDTELGGRSEGAHIHIVHLSDAKTSLELMKDAKRSGASLSIETCPHYLAFSSEEVPDGDTRFKCSPPIRDDTNRENLWKALLDGHIDMLSSDHSPSTPDLKLMEEGDFLRAWGGISSLQFVLPVTWSYGRKYGVTLNQLASWWSERPAKLAGQKNKNISAYLGKQLSGKVLSTFVRGNLVFAEDKHANAACGVPILAK

SEQ ID NO: 71921 - protein, 343 aa, Zea Mays
MAGETVLVTGASGFIGSTLVRLLLGRGYNVHAGVLNPDDGAETEHLLAMAAGAGAGEGRLRIFRGDLLDDAARGCSGVFHLASPCTVDPVSDPQVWYPVSKTLAEKAAWRFAEENGLDVVVVNPMSVLGQIIPPTINSSMSVLLRLLQGCTEEYKDIWMGVVHVEDVALAHLLVFENPSASGRHICAESISHLSDFAAKLAELYPNNKVPKFPKDTQPGLVRAEAGVASKKLVELGLQFSPLEKIIRDAVESLKTKGFILRGQMLLQLKIATHTDSDTLKSSRSHSPHLSSQRGRTLRPGDGERGGQEGDGAGHRRQRLHRIDPRRPPPRPRLQRPRQRPQPR

SEQ ID NO: 71922 - protein, 171 aa, Zea Mays
MARMRALEGQQLLEDDPTIVYLTAYLLTLDAQYDFLARHNRQMISRAEEAEKRNRKLHVDLTTAQARVAALESCEVIAVEALKQAKDEHVQKLMKAYLVTHNQRRALRIQEPASSNPVQPMKDEDPQILEGHPISIRGEKKAWELLEGAIVLEGIPVFPQAMDKQEYPKSS

SEQ ID NO: 71923 - protein, 540 aa, Zea Mays
MMFYHLVAELVLIRMQFLFSFDAAEELKDSIANKNHELVLVQGMNLVDEIWGDARPNPPKEPTRVHDIKYAGIDVPSKLSFIRSQLAENGCDAVVISMLDEVAWLLNMRGSDVPHSPVFYSYLIVEVSTATLFVDNSKVSKDVLEHLEQAGVKLKPYEAIISEVERLAEKGAKLWLDSSSVNAAIITAFKSSCDMKKKGKAGEEVGEKEASSNDRITGDPSVHNGVISAVYNVSPVALAKSVKNDAEIEGMKNSHLRDAAALAEFWCWLEEEICKSVPLTEVQIAEKLLEFRQKQDGFIETSFDTISGYGANGAIIHYRPTPESCSSVGSDNLFLLDSGAQYIDGTTDITRTVHFGEASPRQKECFTRVLQGHIALDQAVFPERTPGFVLDVLARSSLWKIGLDYRHGTGHGVGAALNVHEGPQSISYRYGNLTALQKGMIVSNEPGYYEDNSFGIRIENLLLVKELNLANSFGGISYLGFEKLTFVPIQSKLIESSLMSPSEINWVNDYHEEVWEKVSPLLSGHSRDWLWKNTRPLLDV

SEQ ID NO: 71924 - protein, 53 aa, Zea Mays
MKVATSGEGWRQITELQQLQTTRGLRLTGWSLTFSSVLIKLTEVAKLKYRAQL

SEQ ID NO: 71925 - protein, 77 aa, Zea Mays
MDEALVTDTDSFGDGGAAPPPAPRRRRAGAVAASACTDAAMSTSARNTAVATATPLALPPPCILIRTCVHYCRKKKG

SEQ ID NO: 71926 - protein, 108 aa, Zea Mays
MLAKGRKSQRSSSVTGAWREVSGMIIPPMNTGPRSRCGLASRLIIQTLFVFFLFSLGFRSENSISLLTCTVARISDWVILVSWLVIVLSPLFNQVARISDWVILVPHL

SEQ ID NO: 71927 - protein, 1485 aa, Zea Mays
MGLLSVSRWAFEQGLVCSPNNWNCMEKLLEVLISIRDEVACLSVANLILNSWPSHHRALHVKKTIECAEPVPFAPRGIDILEPKHAKLIFSNKRKSVDDEICQEIGTKKSKHSATLQLNEAKWLALLDGILSLISANTEKAGEYNCSNTVDRCSISEGSAKGLAYNIIDVVISTDTLKSVETAGGNGNDSHHGEILPYDCKATVKEKDGNSDREHPHERRSTRLERLRSRKSGKDENGSDGKDISHAMTQFLESFILKGPSPVEKAYCSGNADASNPDTHNYTSNEEANDLKQFLCKISKNFGPHHIGYMLLEEMAHLKVPFQDYFVKLIELDKLTRGWAEDRSASCNLFLAELYYDRALCSGSPPTSSELSDSSYHLCKIIESVALELPFNISVREIHSTNLDTESSRTGESSSELIERSHENGHINMLNDQKSKHDSSSNMNCAFWIRFFWLSGCLSLSSDCKEKAYKEFNIALSILKNSNKTKSYGEVILLPHTKLVKSLTTDRILREINLIRLESLLWNNDENINKITHTEFMQLLPPLLLSTKDAYVGNAYGPQRESENVISLELSALDVLISACEKAKPMNIQVYLDSHRRKIQVLTVAAGMVGSVTPLKAKGSSNVEFVEAMNRNRLENVVEAVKDVSRNASKAKDIIDQCDNSDGQDGWSPLMSIVGDIQSLLLTIMCAAVKIILSRKLSCSGTSYQVDHLECSCLIDAAIAFCKLQHLDPTISIKTQVDLIVAVHDLLAEYGLCCAGRDGEGEEGMFLKFAIKHLMALDVKLKSQLNSNGMEEDAVPKDVRAEDSVADEPSVSDNKQNSDDEEESELDEIQSCLDSALDQAFFCLYGLKINPDSCSEDDLAVHKNTSRGDYQTKEQCADVFQYVLPYAKALSKTGLVKLRRVLRAIRKHFPQPPYDLFVNNPIDNFLDGPDSCEKILSEICESNESREAILNVLFPGERGYEAFKKLSTASSEPYSDVYENLYYFIAQAEDISATDKHTGFVLKKEGEEFVEQSANIFKYDLLYNPLRFESWQKLSNLYDEVEVDLLLNDGSKHISILDWRTNTDLIRRVEMGRRHSRRCLLMSSLLAKTAPEQSEAHELLALVYYDSLQNVVPFYDQRATLPVKDSSWETFCKNSMKHFEKAFEIKEQWLHAFYLGKLCEKLGHSFSKALSYYNKAMMLNPTAVDPVYRIHASRLKLLYTQGKQNLEAIQVVADYTYNQSTKENVLSMLGSMTKVLQSSSDKTSLDTKEENKFFESDILDKVWHILYDDCLYALGTCVEGELKHFHKARYKLAQGYYRRGEAGDLERAKEELSFCFKSSRSSFTVNMWEIDGTVRKGRRKNPNVGGSRKNLEVSLSESSRKFITCIRKYMILYLNLLEKNTDLWTLEKAYTYLRTDKRFALCLGDIVPVGLGKYILVLTAAIHNPEIRRASGDASVEQLLEKMFTVFMDHANMWADISNIPEVNSPELSESNLYSTSICSRVMYD

SEQ ID NO: 71928 - protein, 388 aa, Zea Mays
MLHLIIEACISRKLIDTSAYLWPGYVVPSGTLKDTALPQESPWLNFMKGSRHSGPLIDALVASPASRCFKLCKMRSVQFGQKGIPYLNTYDGCTILYPDPLIKANDTIKIDLETNKIMDFFKFDVSNVVMVTGGRNTGRVGVIKNWEKHKGSFEQLAGPDAAQHARASGAGAAGETEIQTHRSRSFARQGPAAQPAEPPEDLQGEEEPVVAREQGRNGTQLRRHIDATLGSGNLREAVRLPVGEDLNEWLAVNTVDFFNHINVLYSTLAEFCTPHTCPVRVQVGRRRAKVKVPIKVSAPKYVDYLMDWIEIQLDDEAIFPQQLGAPFPTNFRDVVVKTIFRRLFRVYAHIYHSHFQMIVKLKEEAHLNTCFKHFALFTLFFKPDKRPG

SEQ ID NO: 71929 - protein, 81 aa, Zea Mays
MHGLRAESHLNVWSESVVPLLQGSRSISRGHTFPFLRSAKLTPLSRGVPAPMFLFFGLSIVFALMRLGVELPFSEMNSNIS

SEQ ID NO: 71930 - protein, 438 aa, Zea Mays
MATSKKGLMAMVYIRSAFILIFLSSPCQSNDQLTQTKPLLLEDTLISEGGDFALGFFSPTNSSKKLYIGIWYHRVTERTVVWVANRDNPITTPSAMLAITDNLELVLSDSQGHTLWMATGNTSGDAGGAASAVLLNSGNFVLRLPNGTEVWHSFDHPTDTILPTMRILLSFKTQPATRLIAWKGPDNPSTGDISSGMDSTNLQMFIWKGALPYYRFPVVNDMAVAGAMYQQSNGNAAIMYETRVNAGDALYYTYTVSSGSPYTRFSLDYTGKGRLLSWNSTTSSWTVIIEHPHSCDLYASCGPFSYCDQMGPLPTTCQCPDGFELLNSLNFSRGCRRKEELKCGVGNYFMAMSSMKLPDKFLHIKNRTFDQCADECTRNCSCMAYAYANLSSIGAVGDTSRCLVWSGDLIDMEKNSFSEVLYIRLGGSVGALPLLVHV

SEQ ID NO: 71931 - protein, 179 aa, Zea Mays
MRARDALERHRRRQERDGLPREPSPETPDDDDDDDDDKDDDMAARLGLSPDLRLGQGSSSQPPSGLVPSVSGARTSGSRSEEQGQAEGVLDPLAEVAEVTLGSQADPPVPQEPLPVPAAQEVDPQVVVTAPGRTVPSVPRAPEVGMVPKPAAGQTSAVPAGTEARGASSQAQLALVRSG

SEQ ID NO: 71932 - protein, 475 aa, Zea Mays
MDATPASKKATPAAAVADAVPLAAQQAAEQLSSPESVAGVRASGSEDDDEQVERFYALLDNIRAMRGMVSTGGAAPGRKRARDDEPPWRPAFRMEDFELEEFDSGSAGCDGGKKKRESSIAKRPADEEEQAECPHMQCPRLALLVPLPCRESSPPTSSPEISPPETRPRHGCRSFRPACPPRPPLPRGCCQNWWVDDLSVVKVDHSQVLLASVTFSAPMPLLRLRVASPRSGLPAAIDGSAVSVHFRRMSVFASTRPVAAALGAAAFEEAVVKYEPRALAVSVAASTLDLGKHEVNLTRLLPLSFEDLEDDGDSGFEKWSTSFRLSGPVRGARLNVTFSCSLLAGGGTSEQHRGGEVAGLRRGSMARAVSVQVPTPLPARSRGVRVLHEVLPSLRSARPVPSSVADGGPDARKEEVAAPDCTEEGSPEAKHCTSVEPSCVLTERLERERGCAPLHSTPLASSVLASCSCRGALSP

SEQ ID NO: 71933 - protein, 611 aa, Zea Mays
MPRPGRLQRSGSKRGLDPTGGGGGGDNDDHAPKRPRIPALASVIVEALKMDSLQKLCSSLEPILRRVVSEEVERALAKLGPARIQGRSSPKRIEGPDGRNLQLQFRSQLALPIFTGGKVEDEDEDWTEEEFESNIVKEREGKRPLLTGDLQVTLKEGVGTIGELTFTDNSSWIRSRKFILGLRIAPGFYEGIRVREAKTEAFPVKDHRGELYKKHYPPTLKDDVWRLEKIGKDGAFHKKLNASGIYTVEDFLQLLVRDQQRLRSILGSGMSNKMWDSLVDHAKTCVLSGKHYVYYARDSRNVGAIFNNIYEFTGLIADDQFISAENLTDNQKGYADALVKKAYEDWMQVVEYDGKALLSFKQKKKSVMTRSDAAVASTNHPASNGSAISQKQLSLPAKAGQTSSAGIMNEDGTRNAYNANGNQSARYAATTQNIPANVAMQYDRSAVSPESQFSGSSLQSQASRGSNTLALGPPQQHQSFAFPALGQSMRPTGLNPFEEWPQQQENCGGVDDYLMEEIRMRSHEILENEEMQQMLRLLSTGGAGTNLTEDGFSFPSYMPAPSPKLSYEDDRTRAPGKAVVGWLKIKAAMRWGIFVRKKAAERRAQLVELDD

SEQ ID NO: 71934 - protein, 106 aa, Zea Mays
MSCCCSRTSSWPWRTLSSSGMVTAATCELCSASTSMSSFSMAEASTNPHRRLAHMALTLVATWEEAPYVQRRRPPAYDTWAQSEVPRDDDPASDVVPTTRCGWWTT

SEQ ID NO: 71935 - protein, 178 aa, Zea Mays
MARPVPSPMAPCPTGRDPSMAASSAPAMLSLPSSSARLLSLLARSNSCARRSSPCRAATTPAPGQVSLRAVVRPAPLLAELYPLPMAELPACAAGSLHQRRSSLCPAASLSWSFFVSLCSAQTLLHSLAGRLCALVGFPARRVSSPACSPSGHGALRRSSFSLPRAARPIFLLDLVEP

SEQ ID NO: 71936 - protein, 695 aa, Zea Mays
MGDVPVPSPAPPVSGIDMTPRRRREPSEPRSDSDWDAGSSREGSPDLLRRAPAVQISRASSSSSSWLREIERDRVRLVREWVHMAARDRDDDTGPPPSPVHEHARRDAPRIRGRQARLELVMRMAADRQAELHRLSQHRAVSDFPHRNRIHALLRGRFLRNSGLPEERRPPSVAARELGQLRQRHPVSGLRLENLVRGQADSQVDASSVHDVELSTNDRSELRPPETTQERHERTSEIVSLQQIDSTAMTSGFESGSPNIAEVFCGSHSQAESQDDLEHERRDWQRFSHAVIGEESERTWRENADNMSSHEGTAVEDDNNDHLPEANEESTSVDHLPEGLEGSITDGSLPEAQEDQHDSDHLPAVLEELHGNNHFQESHGEWRRDDRPVEVYDEWQSDDHLPEVNEEWHNDDESNDTADNWHDNNSDQPIDHDAALIRRANTFIPGDDDNVYSTELRELLSRRSVSNLLHSAFRENLDRLIRSYVERQGRGPLPWDLEGTTPAPPSPVQIQEEQRDDEDQELQRTVNRPPLVIPPPPMPPRQPLWHSELHRTNWIRQNIHRSSSDIEWEAINDLRADMARLQQGMSHMQRMLEACMDMQLELQRSVRQEVSAALNRFIGEQGGESKEIIDDGSKWINVRKGTCCICCETPIDSLLYRCGHMCTCSKCANELVRGGGKCPLCRAPIIEVIRAYFIM

SEQ ID NO: 71937 - protein, 301 aa, Zea Mays
MALGCQLRAPPCFSAPARPPSPHPLPDARPRLPLSSGGWCAQASGSGSPRASWRCVGRRRRWRCWLPLLVGVAFLGLLDMAKNVEVVESCTTSFYRCSSHGGEAVGRGAVPWSGDDGEGEETRRCEQRSEREDAMPYDRDVDMDAVLVGGAAKDWSKCYIDPSIEGILRSMESSQYYSKNSINVARGRGYKIVITISLSSDFPVGNSSWAEYDAVAPVPPKTEEALAAAFISNCCARNFRLQALEMLENLDVKIDSYGGCHRNRDGKVDTLKRYKFSLAFENSNEEDYVTEEFFPNHWYDN

SEQ ID NO: 71938 - protein, 195 aa, Zea Mays
MSAAGGDLPETVEVTLRAVGPSRPTTLRLPPLLSVAELRGCIARERRLAGTEEVRLRLILRGKTLPHQDDSHVTLRDGDTLIVAVAPKPPVNHLLDDDVEDEEEDELKFRIPQTTTLWKRKFFMFLRDKLRLPDIILMALFSLSMKAWIIIAMWFLLAPIAQKYDIGPLYIIGTGFLIILINLGRRQQDIRAGQF

SEQ ID NO: 71939 - protein, 555 aa, Zea Mays
MSRGKCAHRPAYAPRGRECREESEDNQTNRAGCCGNIFLVDRAGTGNLSKCSPDLESKDTALFGLSIPASKNTSSCRPRNSASIAGAAERETHAGYQFSSSGHLSTQGGDTTWLFFLSGAARRVRPILSQVLQEQVPSTRSRLGMFVIEDKGGAIALMLASLLFLGTWPAVLTLLERRGRLPQHTYLDYSITNLLAAVLIALTFGQLGDSRRGMPNFFTQLGQDNWPSVLFAMAGGVVLSVGNLSTQYAWAYVGLSVTEVISSSMVVVIGTTLNYFLDNRINRAEILFPGVACFLVAVILGSAVHSSNAADNEQKLGASTNAYKLGTSGNVEPSKQAVDRDAPKDLEESGASGIRQPDKAEAGTAEYLIELEERRSIKVFGSNTFIGLGIVFFAGVCFSLFSPAFNLATNDQWHTLRDGVPHLVVYTAFFYFSISCFVVGVGLNVLFLYRPMAGVPRSSLGAYLRDWDGRQWALLAGLLCGFGNGFQFMGGQAAGYAAADAVQALPLVSTFWGVLLFGEYRKSSRKTYVLLGFMLFMFVAAVAVLMASSGHRSTE

SEQ ID NO: 71940 - protein, 80 aa, Zea Mays
MDSLQVYCNTLHEEVHVLYSQLHPNVPAEPIGTEAGPSGTAGEAFGGELDLFRPPPSMRLVDERSPTPNSEATKSDKKQE

SEQ ID NO: 71941 - protein, 55 aa, Zea Mays
MTTVALSPLRKQGDVSKDPTAPTVVLPQGSSTPPTATTSHEQGAKTSPAATTACT

SEQ ID NO: 71942 - protein, 351 aa, Zea Mays
MDRVHRTAQTSSVNTEDTSRYTASMQQNSFPLRPSLSSSLPPRAPYPPTANDHPGILPPMSAAADDRARRAAAFRPAPLPPPAQKQQLSGVAAAVLDAGGRLGRAVGDVFRRLRIDDTFYSGGGGGGGGAPNRSWRDAGNNGGRPAAAGAPAAASREEATGGGASSGRFARAQGSMNLSATYDSRTHDVESSVVARGDLWRAEASHSSSSSAGAGGNGANNNLFLVQLGPVLFVRDTTLLFPVHLSKRHLIWYGFERKNGVHSVCPAYWSAHKRWFFMSMLCLNPFAFSFMDMQFPNGQLRYVAGDGFTARAFLPLRGGVLQAHGKFPGEKRLSFSFKEWRQRRPDGSVAG

SEQ ID NO: 71943 - protein, 51 aa, Zea Mays
MMQFTHDSLSQFILHILLYGGQLIIKRRAMHRRRCHTLTIGQLIMVTHLLT

SEQ ID NO: 71944 - protein, 108 aa, Zea Mays
MESTALMTARLPLLTSGSRSKPLPFASFTRAACRLASAPFSGSGSVVLLSRRSRDYAGVGSLVSAAADPGDTADAGSESILLSVQGMMCDGCAASVKRILESQGRPPS

SEQ ID NO: 71945 - protein, 342 aa, Zea Mays
MEPQCNVGMFTRAELLEASVELRHHALGCVKSTALRCAVKLGVANAIQRRGGRASVEDLLTELSLDASRLRCLHSVMRALAALGVFKEGSDGEYGLTAISSLLVDDDSSVRDWALAGVDGSDDDNNCSARGTAFKMTHGEDVWDVLARDAFLGDFFNGALASETRFLMDIAIRGSPQVFEGIASLVDAGGGTGAAAQAVAAAFPDTRCTVLELPQVVDAAPIDGPVRFVGGDMTKFIPPADAVLLKNVLHDWSDKDCVIILKRCKEAIAASGKVIVIDIVLGSSSLAICNETQLWLDLFMSTVTTGKERREEEWYRLFKEAGFSAYKISPVLGLLSIIEVFL

SEQ ID NO: 71946 - protein, 340 aa, Zea Mays
MGNVYVADTANLAIRKIGESGVTTIAGGKSNIPGYRDGPSEDAKFSTDFDVVYVKKMCSLLVIDRGNAALRKISLPQEDCTYQDSALLSSDLILVIGAVVAGYIFSGFQHGFGFSGSEKVEAPENEQHESSTIGKPPLVVESLKEEPGAGWPSLGTLIADLLKLAIEGVGKLLLSVVPQRMQHGKRKTDLTPLRDRLVMPEDREETAAAAQKLSSTPMRPETAHAPNPVTETAAPKAPKSTKPSKLRDSSTLSSKHRSSKRQEYADFYGTSEPAPVGAAAKVPKDRLRHRHHHREKSGEVAYGAAHHDLKPAEAKPADYSDPSYDPYVRSKYAAESGYRY

SEQ ID NO: 71947 - protein, 54 aa, Zea Mays
MGHGKPNLSLTNTRKATTQWEWRDGESSMYPLWQETGRWSNCALGWREPGLFLR

SEQ ID NO: 71948 - protein, 437 aa, Zea Mays
MTVGAGIAVQDGSLLALGAKVLREVRGNVLVTPAAGGGLTNGAFLGVRSAPAASRSIFPVGKLRDQRFVCTFRFKMWWMTQRMGSAGRDIPSETQFLLVEVSGGGEQPAVVYTVFLPVLEGSFRAVLQGNADDELEICLESGDPDVESFQGSHLVFVGAGSDPFEVITSSVKAVERHLQTFSHREKKKMPDILNWFGWCTWDAFYTNVTAQGVKQGLQSLEKGGVSPRFVIIDDGWQSVAMDPVGIACLSDNSANFANRLTHIRENHKFQKNGREGHREDDPAKGLAHVVNEIKGKHQLKYVYVWHAITGYWGGVRPGAAGMEHYGSKMQRPVPSPGVQKNERCEALDSMTANGLGLVNLDRAFSFYDELHSYLASAGIDGVKVDVQNVLETLGAGHGGRVMLARKYQQALEASVARNFPDNGIISCMSHSTDNLYR

SEQ ID NO: 71949 - protein, 445 aa, Zea Mays
MMAGYMSRGPQNGSVYVCNLPPGTDENMLAEYFGTIGLLKKDKRNGRPKIWIYRDKVSNEPKGDATVTYEDPHAASAAVEWFNNKDFHGSTIQVHIAESKSKDAFDNPTNLNTIAGVSEQDEVDNGAGRGRGRGDGPGKAWQQDGDWMCPNTSCGNVNFAFRGVCNRCGAARPAGAGGTGGGGGGRGRGRGNSDARGSSRAGAGAATGGGPPGLFGPNDWPCPMCGNINWAKRTKCNICNTSKPGTNEGETGSKEVQCHFGPLPIVVCIAIFLHFRGGRGGGYKELDEEELEEVKKRRKEAEEDDGEIYDEFGNLKKKFRSKALHTGSAQTLPGSGRAGWEVEHRGSSEREGRERSRDRGRDDYDEKETRSIDRGDHGRDQRRSQDREREKGRERRDHEYERSRERDRRHRWYENFAWTRLALQPSDFLCCHIQARAATKQALRK

SEQ ID NO: 71950 - protein, 75 aa, Zea Mays
MTINKSQGQTLPNVGLYLKKKVFTHGQLYVAVSRVTKKKGLKILIENDDGSCGIITENIVYKEVLQSIESHGNIH

SEQ ID NO: 71951 - protein, 63 aa, Zea Mays
MADPVPVHRRTVRRCRGRGVVKEGKPRGLGASVSDPRIQSECGVLFTKPQAWAPQRGPAVPGI

SEQ ID NO: 71952 - protein, 92 aa, Zea Mays
MAMNGDGRLRAAISWDGTYRSCCRGSGLVVGADGDNGMAVRPGAGDRLRVEQARRIKVSVVNLSLRSLALAMRCLPLLMKTESTALLYTSKM

SEQ ID NO: 71953 - protein, 349 aa, Zea Mays
MHKVQSVKYGEEVCFNGIFMLKASSSGLELGNSTWTIQSPRASITYLPSSVFVSAHALDFDYSSLKENDVILFSDFSSLNDTDEDNEKLNEHSMDETDSSLCRYSVFRDDGADADERVPFVCNNDDITEEIERISFICSCIFGAVKSGGSVLIPIGRLGVILLLLELISEMLHSSSLKVPIFVISETAEEIFAFTNTLPEWLCKSRQEKLFAGEALFGHVELLKEGKLFLFPHLHSKGLLAAWKEPCIVLCPHWSLRLGPAVHLLRRWHADKRCLLVVEQGNGAELSLKPFMPLAIQVLECSFLSGVRAGKIDPLLGVLKPKFVMLPEGLKSRCSIKGVPWSFLYYSKA

SEQ ID NO: 71954 - protein, 407 aa, Zea Mays
MDDAGRAPPPAPAAVTVSATAAPAPTPPSATAAADKSSLDPDALYEEGMWQQMAMNSGATMQPGSYPERPGEPDCTYYLRTGLCRFGMSCRFNHPPDRNLAIASARMKGEYPERVGQPECQYYLKTGTCKFGPTCKFHHPREKAGIAGRVQLNTLGYPLLPNEKECAYYLKTGQCKYANTCKFHHPELFNVVPSSRGSPIYTSVHSSASAGPQSYTGTMSSWTFPRASFIPSPRWQSPSNYAPMVVPHGLVQVPSWNSYPGQLQSPGAQQTYGSSQQGEASAGNQGMLSPYRSSSFPVPQYALQRDNVFPERPDEPECQYYMKTGDCKFGAVCKFHHPRGEELCKFYSRYGICKFGANCKFDHPTMAAPMGVYAYGFSGSASVAPASTNAPMTRHLLGSPSGSGYMS

SEQ ID NO: 71955 - protein, 86 aa, Zea Mays
MLGWFEWRWLGGIYSPQLPKQPLGVAAVDGHTQTVRCATGRCPVRQPRHPTVRVRPLELCLLVAPDSPVLNRTGTVHSPVRLWRLL

SEQ ID NO: 71956 - protein, 423 aa, Zea Mays
MLFRTALALLEFYGPALVTTKDAGDAVTLLQSLAGSTFDSSQLVLTARMGYQSVNETILQELSNKHRPSVMSAMEERAKGLGVWTDTNGLASKLYNFKRDPEPLVSLSNSADQLSDVGDGDANQESDPVNMDDEYVGVTVKSEIDSLPDPKDQVAWLKLELCQLLEERRSAVLRADELETALMEMVKQDNRRQLSAKVEQFEQEISEFREALSDKQEQEQAMFQVLMRVEQELKIAEEARISAEQDAAAQRYAANVLQEKYEEAMASLAQMENRAVMAETMLEATLQYQSSQQKALSPCPSPRPSMLDASPSQASQNSSQVFQPRRKNLLGPFSLSWRDKNKEKPNNVEDSANTKFTNSDEMVDEKQMETLDLDNEQRAESTKEDGKMRAETPQKDDDLVRVQLTTDHLNGHHEQMQEIKLDW

SEQ ID NO: 71957 - protein, 148 aa, Zea Mays
MVSLRKTIRAYLLEMGSPFLPCRARSGRFVVKDYSLKMWLKDSPFCMDLELKDAPAHPKLNSMKLIEGYFMRAGFVSAFKDIHERLGEVWPKKFSRLALLSEECRDEVIKADIQGRKEKLERMKKKGIVTARKSKTRARRGKFVRQQK

SEQ ID NO: 71958 - protein, 317 aa, Zea Mays
MASPCHEESGRGRGPIAMAMARGRIAMGGSGLHCASAIHCGKRRGTCCSTQFADTLGNRDSNNISLENAKSYKIEAFKAQMQLPFPKLLCLMTMQAAKDPRVDERGGVGDEQMAGGGPAASALSSPWRALLQRALDANAHLRHSTYFQLATVGAAGRPANRTVVFRGFQELCDKIQINTDARTNKIGEIKSCPFGEICWYFTDSWEQFRISGSIDVIDASTTDPAKLQHKEKAWFSSSVKSRSQYLGPQPGIPVLDDEHVKDVHLDPLAGPVDAFCLLVLDPEKVDYLNLKSNQRLIFTRRQKDDGSNDWMAVKVSP

SEQ ID NO: 71959 - protein, 97 aa, Zea Mays
MSNSGGKGCRPRAKSMPPKKQLGISSFLPEPPSLPSSWKDSTSGANFISGTKRTLCARDSQGIPGSSSVGAKSVTAGDATARLPLEPGIDGTSTQIQ

SEQ ID NO: 71960 - protein, 547 aa, Zea Mays
MPDSPSDDPRRKKVMAEWSNSVRPIQWRCHWLELRMRELSSQISKYDKELALIKKQNELQQAASKANGTMSESMQIHKGHGNSIMKRRKRKRHEDSVDASLYINKHQILSYYHDKQNKGVQTGDLLVDDDCGTVDGSISGGLDTTTLLDSEDYDMICEQHALQDILLTIDGLQSRVHLLQDRLSKAHSEGENLAFSGADTDVRVAGKRQRTQKHSFSNTKSRHTKPQKRKNLNILLKDDDDGQALAGGPALADGETDVHMIGASRSTEERSGECNHSRDKAITVDLLLGTGNSITNSDIGDLYNVNTDDVLIANQAAVEACQQFHEAKHLPSGSPSKDKIISAPAEMKNNSPPVEVKNTCGPVKIESLCSPVEGENTSDPALEQESFLEKSPSRQPVSPGNKQELKPKKRRKKKGSLFTKKQRKVDSRTPDAKEKTEGTPSDVAEETESPLSGATGPGTMRSCCAGKKRKSGNEPADANKTGKPSSAVKKQKTENPTAAANATKKRATEKKLESASASQKLQVEKAVLVAVNSRRSQRVRKPKVFAD

SEQ ID NO: 71961 - protein, 554 aa, Zea Mays
MDMAGRSRCRCSSHGRLLWLLLACSWVAAARGQQTARTDPAEAAALSTILGRWGLKASPGWNISGELCSGVAVDDTDVDNSPTINPSIKCDCSYDDNTVCHITKLRVYGLNVVGQIPAELENLTYLSNLNLMQNYLTGPVPSFIGKFPMQYLSLAINPLSGTLPKELGNLTDLISLGISLNNFTGELPPELGNLSKLEQIYFDSSGFSGPFPSTFSKLKNLKILWASDNDFTGKIPDFIGNLTQLEVLRFQGNSFEGPIPKSLSNLTKLTTLRIGDVVNGSSSLSFISNLTSLDVLILRNCRISDTLATVNFSNLAGLTLLDLSFNNLTGQIPQSILNLDNLGFLFLGNNSLSGSLPDIKSPSLNNLDFSYNQLSGSFPSWATQNNLQLNLVANNFILGSSNNSILPSGLNCLQQDIPCFRGSPEYSSIAVDCGSNKSFRGLDNTFYEMDPTNIGAASYYVTGQTRWGVSNVGKFNEAPNGSYTIDSSEQFQNALDSQLFQTARMSPSSLRYYGIGLENGNYTVELQFAEFAYPESPTWQSTGRRVFDIYIQVV

SEQ ID NO: 71962 - protein, 96 aa, Zea Mays
MALIIKSFRQILKQRRGKITSPSPRGCATGVVSPVTLLLNVQFLVIVTVTVTKTRRERIRRKRGTTRRRAAMCTCVGNGTPMRAPPTPPPTRTPPT

SEQ ID NO: 71963 - protein, 80 aa, Zea Mays
MTQLQTCPIWQIPQARPSLPTLTTICISLPLIAIWMLPWFNFLHSFQLLHQLSGTKLLWFVTVLNLAIIILLFPPWMVMW

SEQ ID NO: 71964 - protein, 385 aa, Zea Mays
MSAQIALRVHRLLDLPAFLLAAGADSEVHLTYLPGLLTLLTTSGRYVEDWVRVFYVSVWIDPDHHWMRFRFEREDVTITATQIRQLFGFHESSTRLHSLCYGTSDPPRRPHGGVAPGTAHVAALFRPPFSDGSRRSLVDFTTAAKFLFQLMIQTLLPRMGYREATTHIQLWLLGALVSHSEFDVVDFLICEIEDTVLDGMCARRQLPYAHYLCHIFAQLIRPPQFQGTLEASRLVFGSYHPAPEAPVPASAPVFYTQVEDAALHQFEAQDAAIDDDDDDDDFGIPPPPLPPMPPRSHDHEAGSSSATPAAPPAIDPALASILQTLTQQQAHLAAEQTRQAAAHQQLSERMLSMFQTIQDRHDSLQQQLLQDRAKSRAFMTLMLQR

SEQ ID NO: 71965 - protein, 118 aa, Zea Mays
MSLCGMRAWKPRKIGHTVLAFPWFSYIRFELRSMPCIHVQWYLSISSALRLGSIKLPLALRNLHAIFLSEVTTPTRSSPHHGQGSSTGFWPRCAGSIISRGGARRAGGGLRGAEQRVA

SEQ ID NO: 71966 - protein, 52 aa, Zea Mays
MGKHGHGRDTEGARHGRARTKARAARTVDGKLKPPEARALETIQGESTAAMV

SEQ ID NO: 71967 - protein, 135 aa, Zea Mays
MVSAPPPSGPFPCLGRPAMDSPSGLWWRPAPSSCPPFPSTPSMSPRYSIDKKNLERKLRQYPHKLTCLYTANDDSDSFMSVRHILFILTCLYTNLTQAFLSITWDSEFSELCVVEEEERPMSVELEPIASEQQLN

SEQ ID NO: 71968 - protein, 89 aa, Zea Mays
MYNLSTKLYVVCSVKMLSSCNHSGRWVILSTNGMAGVMSRFWRAKARDPRSHGRPYTIAGFDLVSSHKQPCNQMMSLSTRLAFSPVIKS

SEQ ID NO: 71969 - protein, 67 aa, Zea Mays
MQQSGCMLVLYVLTSLPTYCGNNVLYRWHTYDSHGILLVVSYTYVFEVSVPAEKSITAQFPNDAIHI

SEQ ID NO: 71970 - protein, 157 aa, Zea Mays
MTSVVHSVSGDHRAEDQNQQKKQAEPGDQQEAPVTSSDSQPTVGTPSTDYVAPYAPHDMSHAMGQYAYPNIDPYYGSLYAAAYGGQPLMHPPLVGMHPAGLPLPTDAIEEPVYVNAKQYNAILRRRQSRAKAESERKLIKGRKIRERKTRDVNQVKC

SEQ ID NO: 71971 - protein, 180 aa, Zea Mays
MTGYRSRSPSRSYSPRRRYSRSPPRRKRYDDPRDRYRWAGAGGGGDRRGYGRPLAQSGLLIRNISLTARPEDIRATFEQFGPIKDVYLPRNFHTRELRGFGFVKFRYPEDAAVAKREMHHQVIGGREISIVYAEENRKTPQEMRMRTRTSGRYMDERYTRLSRSPRSRSHFRRDFSQQRI

SEQ ID NO: 71972 - protein, 492 aa, Zea Mays
MQSSLASSFHLDAGECILAIDGDKPIQPVLQHIGISAWPGRLVLTTHALYFQSIRVGYGDKIVKYDLSTDSNQVIKRDLTGPLGVRLFDKAVMYKSSTLTEPIYFDFFELGGPSRRDYWLAITREVLQVNRFIRKFNLGDVQKAEALSKAILGILRYSAVKEAFHIAPSHFKTTLTFSLAEKLPKGDMVLEALYNNYFQLLDSSLRHLAIDSAVDRMSENHSIPFSLYALSRMGFLLLKTNDKSEKEMSFCAVCFGVTKSLEAALEESICYSERIESARATVDQVKVEGVDANLALMQELLFPLIQAGKIVYSLSQWEDPLKSLLFLAFMLYAIQRGLISYIAPFVFLTFAIIMLWHKYIGDGKLLEVLEVKPPPSKNAVEQILTLQEAISKLENFLQSANITLLKFRSVLFACVPKATEVVAAVLIVAAAFLVFLPSRPLIQMLVLEMYTREMPLRKQNTEKFRRRIREWWARIPAAPVQMIRPNESKKKR

SEQ ID NO: 71973 - protein, 1401 aa, Zea Mays
MALTRQRASLPTVDGPDPPVDCAPHRPAWPYFAFVPVSACEQLILLSRPIVTGPRTLRCESIIFGSFMHHIFQQHRKFMGENGHLGNSIYRRLETSLYKNEAVNLFFSDTSAWGTSKEGTSRNTGGMEVALVSTVLKVLGTKLAPLALKELSSKAGVAKDLQELQDLVEEINNWLQTVGDKDRSSKWLKKLKEVAYDAEDLVHEFHIEAEKQDREITGGKNTLVKYFITKPKATVTEFKIAHKIKKIKNRFDAIVKGRSDYSTIANSMPVDYPVEHTRKTIGEVPLYTIVDETSIFGRDQAKNQIISKLIETDSQQRIKIVSVIGLGGSGKTTLAKQVFNDGNIIKHFEVILWVHVSREFAVEKLVAKLFEAIAGDMSDHLLLQHVSRTISDKLVGKRFLAVLDDVWTEDRVEWERFMVHLKCGAPGSSILLTTRSRKVAEAVDSSYAYDLPLLSMEDSWKVFQQCFGIAMKALDPEFLQSGIEIVEKCGGVPLAIKVIAGILHGMKGIEEWQSICNSNLLDVQDDEHRVFACLWLSFVHLPDHLKPCFLHCSIFPRGYVINRCHLISQWIAHGFVPTNQARQAEDVGIGYFDSLLKVGFLQDHDRDQIWSTRGEVTCKMHDLVHDLARQILRDEFESEIETNKQIKRCRYLSLTSCTGKLDNKLCGKVRALYVCGRALEFDKTMSKQCCVRTIILKYITADSLPLFVSKFEYLGYLEISDVNCEALPEALSRCWNLQALHILNCSRLAVVPESIGKLKKLRTLELNGVSSIKSLPQSIGDCDNLRRLYLEGCHRFEDIPNSLGKLENLRILSIVHCFSFEKLSPSASFGKLLNLQTITFNCCFNLRNLPQCMTSLSHLEMVDLGYCYELVELPEGIGNLRNLKVLNLKQCTQLRGLPAGCGQLTRLQQLSLFVIGDSAKHARISELGNLDKLDGELQIKNIRYVKDPSDTDKVRLKKKIGIRKLSLDWYSRLEVQPDDVEEELSLNMEKELHLLDSLEPPSKIEKLRIRGYRGSQLPRWMAKQSDSCGPADDTHIVMQRNPSEFSHLTELVLDNLPNLEHLGELVELPLVKILKLKRLPKLVELLTTTTGEEGVEVLCRFHHVSTLVIIDCRKLVVKPYFPPSLQRLTLEGNNMQLVSSGCFFHPRHHHASHAHGDESSSSSYFADETGTHLERLELRRLTGSSSGWEVLQHLTGLHTLEIYMCTDLTHLPESIHCPTTLCRLMIRSCDNLRVLPDWLVELKSLQSLDIDSCDALQQLPEQIGELCSLQHLQIISMPFLTCLPESMQHLTSLRILNLCECNALTHLPEWLGELSALKKLLIQSCRGLTSLPRSIQCLTALEELYISGNPKLLQISASYSKEDKDGQAPTTFRSHGLTGLTTSIAVRPKSSIWSGTCSSSQ

SEQ ID NO: 71974 - protein, 97 aa, Zea Mays
MNLASVVPCAQAFLALMTPAAGSHRRVHTHAAASKSGLACRVARSGGTRWLPVSCAAGGGAVGDTFVTEDTTNVMFPREVTVPGYTHPLVAVGTGSS

SEQ ID NO: 71975 - protein, 562 aa, Zea Mays
MSSQDSIGTVLKCMQKGAVDFLVKPVRKNELGNLWQHVWRRHAMNCQTNGSENNAASNHVSTNVANGSKTGENNDEESDAQSFGNKRETEIKSAETLPDIRRDEMAGSSKKIELQNKSNDGVNTKVDASKDSDGAPSESEKNVRSKCLNGITSAKVAEQIMDNALRITDASSRRPTNLGKDLAMTEPAADRKCQSLVMENNAVKEKNPGEKSKSAVIGHADSYPSQFLETNLGKQQYRNGYKNQEFREKDIFNHSNSSAFSRYGNRRIESSGEIQFLPSRCIVGQEQHVHGKDPVFQPNGVLLPPNDHNTGESTRQARITLDSSMEGADIICSSSAREDAGASSSSHRKDSMSHPSYGFVPVPIPVGAMMPYHCGAILQPVYYPQGPLMHCNSSAINKATIHQTSGQSNYREDCGSGRPSQVDEHKQSEEKHQLHHSRQIHRESGQPVDMVRAHMDHANQSASCSRDICKGSGCTGSGEADTNANTTVALESGNESGIQNSDRSHREAALMKFRMKRKDRCFDKKVRYHSRKKLAEQRPRVKGQFVSQKLKAAMATEAETDS

SEQ ID NO: 71976 - protein, 753 aa, Zea Mays
MDPDDESAAQRKAADLHLPRVTEPASAPARTFCAAQRVLSYGDGPVASASAQRCASFPQRHGHGHGHGEAALAPAASFAAWVDGGPTPPSAVAAALERAMSQYDGAGDALPEFVGAGGGEGIFRVPLRAAVHPARPPPLEVRPHPLRETQVGAFLRTLVCDPRRRKLWAGAESGVRVWCLDEVFRGWWPGAGPRRRGDEEAAPFRDSVPVPPALCAAVDSANGLVWTGHREGRIRAWRVDHAAPAGGDPTGSAAMFKEAFAWQAFSRTPVLAIVVTPYGEIWSGSEGGAIKAWPWEALAKCLSSTPEEIHEAASLVEKSYIDLRNHATVGNMCSLPTADVKHMLADHCRLKVWSVTSMTFALWDAKTRELLKVFGIDGQVDLARPEAPVMPEQFIEEEIKAKPTKKEKLQGSLSFFRKSRNALMGAADAVRRVATKGTFVEDNRRTEAVAQAMNGTIWSGCTDGSIIVWDGNGNRLQEFHYHSSSVQCIEALGERIWVGYASGTIQVMDVEGNLQAGWIGHSCPVISMAVGDSYIFSLAHHGGIRGWSLSSPSPLDDILRYELASRELSYTRLENLKILVGTWNVAQEKACPEALKSWLGGAFFDVGLVVVGLQEVEMGAGVLAMAAAKESVGLEGSTNGQWWIDSIGKTLDEGISFHRVGSRQLAGLLIAAWARNDLKPHVGDVDAAAVPCGFGRAIGNKGGVGLRIRVFDRRICFVNNHFAAHQENVSRRNADFDHIYRTMTFNKPHGSTG

SEQ ID NO: 71977 - protein, 72 aa, Zea Mays
MFQVGARGGEQIMKTSSKWRVESIEQIIRTVLSVINGAIYYTRILNMVNRSADRRYVDVSSQGNFYLMWELG

SEQ ID NO: 71978 - protein, 302 aa, Zea Mays
MEYMIVQISGWIELPRLGKLQLSTNCWCTDDSECESHCHFSAHLHGCPVIPGVFRGKLVVQLSLAFDHSLQGRFAARNRGAERSLCALFSSTYVQMSLLLAFLHWMACNLFQSQPYNLNNMRESMFMERQPGPSLQLTRQKCGDTIHCLFSQEVHEQLWIYSPLPAITLQTYQRARFWHPVYILEFGFYFAAPKSYRYWSSLVCLAQVEQLSESIFLLVASSLAHGLFNQLSLTSENGEAIDSLGLTGMFACACQLEVMSHGTKLRPTPWPSFSLSCYQDEDGEQFLYQLTHDLYNSCWAKQ

SEQ ID NO: 71979 - protein, 375 aa, Zea Mays
MTFSLGIAVSGSVEQLIMLQKDSLRTTLDKVCARKRVRCVEDLLSNKSAVKPKPRFLRVNTLKVTTESVIEELNKMHMVDKDEMVPDMLVLPPGTDLHNHPLVTDGKVFLQGRASCMVAVALCPKPGWKVIDACAAPGNKTVHLAALMNGEGSIIACELNKERAKTLQHTVRRSGANNIRIVNGDFLEVDRNDPSYAEVHAILLDPSCSGSGISTERLDYLLPSHSRDSQDDAGTSSRVMKLSAFQKKALSHALSFPSVERVVYSTCSIHQAENEDVINSVLPLATSLGFELATPFPQWHRRGLPVFQGSEHLLRTDPEDGLEGFFIALFVRKAGPTSEEPSEDATVEVRTKQVRGRRNGVRAFSSLRLSRMILW

SEQ ID NO: 71980 - protein, 387 aa, Zea Mays
MGRFCLISLPPSPTTSSFPTYSLGCSLMAIEAARLSPSIAAAAFLASRPPLALRPFSLRRRFPLLRVLANSSGGDGRVVALSSSELRKRRGLSSSSGAADSASDGDEKLRSLRRLFARPDVAIDAYIVPSQDAHQSEFIAECFTRRAYLTGFTGSAGTAVVTKNKAALWTDGRYFLQAEKELSHHWTLMRSGNHGVPTTSEWLNDVLPSGCRVGIDPFLFSFDAAEELKDSIANKNHELVLVQGMNLVDEIWGDARPNPPKEPTRVHDIKYAGIDVPSKLSFIRSQLAENGCDAVVISMLDEVAWLLNMRGSDVPHSPVFYSYLIVEVSTATLFVDNSKVSKDVLEHLEQAGVKLKPYEAIISEVERERCKALVGFFKRECSHNYCI

SEQ ID NO: 71981 - protein, 353 aa, Zea Mays
MSSPWSPLSIEEDEEIQELGAEEQQVGEQLRQGDGQQQELTADARAQETGMKRARSVSSSSTNPSNSRKSEGKIKVEENAPGAATGVILSLRESLQDCKQSLASCQVELEAAKSEIEKWHSAFQSIPAVPSGTIPDPVSVVSYLSTLKSSEESLKEQLEKAKKREAAFIVTFAKREQEIAELKTRRLLLDPAIHEEFTRLKNLVEEKEKKIKELQDNVAAVNFTPSSKLGKMLMAKCRTLQEENEEIGTMASEGKIHELGMKIAVLKSQNNELRNQFDVLYKHMDGVTNDVERSNELVSILQEELEAKDLELTRLKEVLAQKGATQDAPVETSDDAGNGQEADSDTLQVKAES

SEQ ID NO: 71982 - protein, 63 aa, Zea Mays
MSVKNFPPTALASAEGSFISSVDKVASDCAKIFTCSQPFFSKMVAIPLAPEKAHISPRLFKIS

SEQ ID NO: 71983 - protein, 819 aa, Zea Mays
MVTPPTVEQEDEEMLVPRQEAVDTDAAQPMEVVAQTEVVSTAESQPVEDPQTSRFTWTIENFTRFSEKKHYLEVFVVGGFKWSVLIFPPVLQLQLKRFEYDYMRDSMVKINDRYEFPLQLDLDRDGGKYIAPNADRSTRNLYTLHSVLVHSGGVHGGHYYAFIRPTLSEQWYKFDDERVTKEDAKKALEEQYGGDEELPQINPGFNNAPFKFTKYSNAYMLVYIRESAKEKIMCTVDEKDIAEHLRVRLKKEQEEKEHKKKEKAEAHLYTIIKVARDEDLKEQIGKGIYFDLVDHEKVHNFRIQKQMPFSCFKEEVAKEYGIPVQFQRFWLWAKRQNHTYRPNRPLTVHEETQSVGQLREISNKAHNVELKLFLEVELGLDLRPLPPPEKGKEDILLFFKFYNPEKEELCFMGRLFVKALGKPSEILAKLNEMAGFPPDQEIELFEEIKFEPNVMCETIDKKLTFHYSQLEDGDIICFQKSPGAEYDAPVRYPDVPSFLEYVHNRQVVHFRSLEKPKDDDFSLELSKLHTYDDVVERVARQLELDDPAKIRLTPHNCYSQQPKPQPVKYRGVVHLSDMLIHYNQTSDILYYEVLDIPLPELQFLKTLKVAFHHPTKDEVVIHSIRLPKNSTIADVIYDLKTKVELSSPNAELRVLEVFYHKIYKIFPLHEKIENINDQYWTLRAEEIPEEEKNIGPNDRLIHVYHFKKDINQTQIQNFGDPFVLVVHEGETLAEVKKRIQSKLQVSADEFSKWKFAFISMNRPDYLQDSDVVPTGFQRREVYGAWEQYLGIEHADTAPKRVYTVNQNRHAYEKPVKIYN

SEQ ID NO: 71984 - protein, 55 aa, Zea Mays
MRKRLLQGPMTLLLSSTGAHHLHKIPSITLEHLHCRVKQGTSERLTQSASISEPR

SEQ ID NO: 71985 - protein, 661 aa, Zea Mays
MIVRTYRRRSRSISEGGGGVSSSQEAFDFDADVDVLGSSASQPLPPSQESSSMWDFDEDPPPSPPRPGKEGRRSGRGGARRGGGLELAEAPAMAPTVTLMEAEEYGEMMESVDDVTFALDGLRPAAQKRTRRASLLALLGICDSAERRRVLRSQGLVQQIIDAILVLDIDDPPCAIAAGALLFVLASDVQDNNLLSSETCVHFLLKLLNPPVNVVDAKAPSIGSKLLGISKFQMLNGSNKDVDSCSEDILLKVEEILLSCKEIKPADRDYKRTTRPELCSKWLALLTMEKACLSAVALEDTSDMVLELGGNFKETLRQLGGLDDIFNVMVNCHSELEKLVKDASTTVVEGKEGAPLQSTTLLLKCLKILENATFLSDNNKTHLLSMSRKLSPKCRSLSFVGVILNIVELLSALSLLQKPSTVSRKADPKNTKVCNGACSADSRGLSLLNHHCKCNNSKKKSILLNRRCQYCSSTKSEASHVTLSSSSDVSQSERILNCSSFSSNGTSSGSFGVKHINGASLKLNVRMDRSKAYPVRGSTGWISMKAQTSDWNSREMAKKRRLSENVRTDLSNGGDDPFAFDDIDQEPSNWDLFGPKRKSPQKRAKRTNGEVLDDCGTALMGSPKLCQPEDIYQSVATSGSKVVDESNLLEDCLLASVKDYA

SEQ ID NO: 71986 - protein, 117 aa, Zea Mays
MNENFEVAKAKQEICEMERSRVQKIIEELLDSKEKCYETSIECAKKLKDSFAKVGVYSLEQRFIRGDPEGVIQWIGEEAEDFDEILGDRGDFCTFAGARGVAAILEKAGCEHVKVVA

SEQ ID NO: 71987 - protein, 419 aa, Zea Mays
MPFIEALGQFSYRVGPGNFCLVHVSLVPVLNVVGEQPLEEHVKAKLSQFCHVPVSNIVNLHDVTNIWHIPLLLRDQKAHEAILKVLDLQYDGKVPREPELTKWTKRATKFDKLKTPVKIAMVGKYTGLSDSYLSVIKALLHASVAMERKLVVEWVPSCDLEDSSAKETPEAHKKAWKLLKGADGVLVPGGFGDRGVQGKILAAKYARENNVPYLGICLGMQIAVIEFARSVMKLRGANSTEFDPATTSPCVIFMPEGSKTQMGATMRLGSRRTYFHVSGCKSAKLYGNASSVDERHRHRYEVNPDMVPDFEKAGLQFVGKDESGKRMGIVELPSHKFFIGAQFHPEFKSRPGKPSPLFLGLIAAASGQLEPLLQRSNPTTKACSISKVPKLKLYPTGPVNNPLNSLVNGYYPNGTGIHT

SEQ ID NO: 71988 - protein, 76 aa, Zea Mays
MHGQFQFLSLHGPCIVCSATRAYPKGSNSGSGISADIHESIVYVVISQPFLSNQINMCTCGRPRFWNSIEYSSAST

SEQ ID NO: 71989 - protein, 277 aa, Zea Mays
MGHRRFLGPNHPYRFDLDSFDGKVEDRPAPRPLSGEEILLQTENMHTVHGKGCQHKKKAKKKEGEPTIIWKRRSIFFRLPYWKDLMLRHNLDVMHIEKNVCDNIVNTLLGIQRKSKDNLKYRLDLQSLGIRTELHPIPVGDKLYLPPASYTMSASEKTLFCEVLKGVKFPDGYASDIRNNVDVKEKKLVGLKSHDNHVLLQYLLPLALRRILPEIVSAALIRVSNFFKQIYSPVIRISDMHKLESEIAETLSILETIFLPSFFDIMVHLMVHLPTQV

SEQ ID NO: 71990 - protein, 530 aa, Zea Mays
MVQGEESSWRMERAALPLNQALAYGVQAHAAAAAAPPTCFLDFQPAAASAAYFGFGELEEALIHGGGAASAGGGVDPGVIIKNDVAQAKSAGYLAGAGTGRPPTLEIFPSWPMRHQQQLHSGNSQSVGSTGTDSSSAQNTMSQMELVSPASSAPRQEVMMVTTDDYSYKPGLAAAPAAAAPPSFQQHHPLPLQLHGGEGGGDHDKRKHGSTRKDGKLVDAKTERRLAQNREAARKSRLRKKAYVQQLETSRIRLQQVEHELQRARSQGLFVGGCSAAGDMSSGAAMFDMEYARWLDDDTKRLAELRGGLQAHLLDGNLGLIVEECMQHYDELFQLKAALARSDVFHLLTGSWATPAERCFFWMGGFRPSELLKILIPQLDPLTEQQLLGICNLQQSSEQAEEALAQGLHQLHQSLADTVAAGTLNDGAAAPNYMNIMAVALEKLASLENFYQQADNLRHQTLHQMRRILTTRQAARCFLSIGEYYSRLRALSNLWASRPRDNFIGTESLSPTATELQALHHQQQNQFAGF

SEQ ID NO: 71991 - protein, 1087 aa, Zea Mays
MLAAVMADSGDAAMAVVLGWSSSWICGEEDGGRLTLTVASKCVQRTLIDCVNVVLFIAYVCTLAAACVRRRQRSADASSGRSGAPSRWVLLVVSTCCVAAAVAYCVTALQDAYDIKTAVPYFVRGLVWIALAASLHAQPTRPARVVAVLWWVLLSLLATAYNSEILAGGHSLDLAEMIAWPVSLLLLLCALGSLLPRGDGHHYRDASNGSSGLSEPLIGNDRTVPTSELYRAGLFGQLAFSWLNPLLRVGRSKALDLGDIPLIATDDTAHHTSQQFTEAWSRHVSDKARSRRGVGSNSLALVLGKCFLSEILLTGFYAFLRMLSIAVAPLLLFGFVWYSNQEERDLRVGLSLVGCLLLAKLVESLSQRHWFFSSRRTGMRIRSALMAVIFQKQLRLSIQGRNNHSTGEIVNYIAVDAYRLGDAISWLHMGWTSPLQLVFAVATLFWALKLGALPGLVPLVIFGFLNVPFAKMLQGYQAKFMVAQDERLRSTSEILNSMKIIKLQSWEDKFRSTIESLRDGEFKWLRQTQMKKAYGAVMYWMSPTVVSAVMYTATAIMGSAPLNASTLFTVLATLRVMSEPVRMLPEVLTMMIQYKVALDRIEKFLLEDEIREDDVKRVPSDDSGVRVRVQAGNFSWKASGADLSLRNVNLRVNRGEKVAVCGPVGSGKSSLLYALLGEIPRLSGSVEVFGSVAYVSQSSWIQSGTVRDNILFGKPFNKELYDKAIKSCALDKDIENFDHGDLTEIGQRGLNMSGGQKQRIQLARAVYSDADVYLLDDPFSAVDAHTAAVLFYECVMTALAEKTVVLVTHQVEFLTETDRILVMEGGQVSQQGKYSELLGSGTAFEKLVSAHQSSITALDTSASQQNQVQGQQESDEYIVPSALQVIRQASDIDVTAKGPSAAIQLTEEEEKGIGDLGWKPYKEYINVSKGAFQFSGMCIAQVLFTCFQIASTYWLAVAVQMGNVSAALLVGAYSGLSIFSCFFAYFRSCFAAILGLKASKAFFGGLMDSVFKAPMSFFDSTPVGRILTRASSDLSILDFDIPYSMAFVATGGIEVVTTVLVMGTVTWQVLVVAIPVAVTMIYVQLGS

SEQ ID NO: 71992 - protein, 78 aa, Zea Mays
MRLHRPLQLWLQPFHKLRHIKCFIQCVVVYRGSIPCLIKRLLIFLHGSNLTQVQQGLHSLRILLSPKLLDHSPTELLP

SEQ ID NO: 71993 - protein, 65 aa, Zea Mays
MCAVCFFLMTLYYLSLLSEWQIRDLTQTESDATSWVKHTERGLPTSGYRKFITQGTGVDVEYCRG

SEQ ID NO: 71994 - protein, 253 aa, Zea Mays
MVVIELEPEEATRPSSPASEEKAAAAAGGEAARPSSSAAPEEAPTAAAAAVGGEASRAAGEEEEAFEDALTDEQLREKSRSQANDAKAEGNKFFGSGQYEEALSKYEMALQIAAELESSEDIRAACHSNRAVCFLKLHDETVKECTKALELNPSYLKALLRRAEAHEKLEHYDEAIADMKKVIEMDPSNQQATRSLFRLEPLAAEKREKMKEEMIGKLKDLGNSVLGRFGMSVDNFKAVKDPNTGSYSIQFQK

SEQ ID NO: 71995 - protein, 187 aa, Zea Mays
MSDSKGGAGGMGMNMVTTVMAFSVSAFFVLFVFTRLLCARLHLSRAAAAAQGYNVHRVPGGVRGQGRGARAARLRPRLPRDLHRRLAEAAPHLPRLPRLPARQERLPRHAGRLQPPRRRRRRRSHRPACSRVLVRRVTAGSRTPATDRRHWAGGWLAGDRLRRARLLARSEPCCCCCWLVTILFCAR

SEQ ID NO: 71996 - protein, 187 aa, Zea Mays
MSGAVDPTLVLVQIEAHIATVKEEAFSRKDILEKVERWLNACEEDAWLEDYNKVAMLDDNRYNAGRGAHLTLKRAEKARILVNKILGLVDVLTTKIVAWEAERGKEFTYDGNQVQSGSSSLGSSGMLYEGSSGDNAPFDINDFPQLTGRPNSAGGGQGQYGNTAMLPNIPMISRLYITSDYSYLKDH

SEQ ID NO: 71997 - protein, 75 aa, Zea Mays
MAEPTKRSKGKALTSVKTWDDFSSEEEPPRTQNRRSSSCSSWSSCKCLTTRGKISIPSSSNDSSSGHVVGEGSPP

SEQ ID NO: 71998 - protein, 64 aa, Zea Mays
MTRRSSKATLSRVSAMHLLVHDLLEVVRMNVPHIGMGVGVEAGDMIVIPIMCTLPPRCHLSSLS

SEQ ID NO: 71999 - protein, 54 aa, Zea Mays
MIKPLTKDRIPLAHTKVRHRENTIIMKPQIKVLELLHRSEFQRKITSSYLKCSR

SEQ ID NO: 72000 - protein, 315 aa, Zea Mays
MQGRMRGARRSARGESSRKAAGREVEPFTLCGEMSHLTRATSEPCRRARGAAFARRARPFSAYELVSAREAGRAGGAGFSAADRAYLGRQHIPTKGPWGVDDVESEAYVSQFSADGSLLIAGFRGSRIRVYDAEKGWKIHKDISCRSVHWTVSDIALSPDQRFLAYASLTPIVHIVNVQNAGKESHANITEIHEGLDLTGGDEDEDFGIFSVKFSKDGKEVVVGNNEKSIYVYDLSANKVSARIRAHKADVNAVTFADETGNVLYSGSDDSLCKVWDRRCLSGEKSAGSENQTLGHQENVFRREISPSESSGLGL

SEQ ID NO: 72001 - protein, 54 aa, Zea Mays
MKPLQDLVLGCNKFGVLLKFEFRVKCFSFWVVGKVVMLDEIINYVQTLQWQIEG

SEQ ID NO: 72002 - protein, 288 aa, Zea Mays
MHKVVLFSLRLGGVLVFLGFFPGVLRAFCSGFAFRLGEESGAAQEDTGFIPHVQSVAARNSRRAPVRVMRSEERMKVEEAGGGEIGEMEPPAVSTVAVAVSGGRSSRHALKWALDKFVPEGRVLFRILHVRPAITMVPTPMGNFIPISQVREDVASAYRKEEEWRASNMLVPFQKMCAQRKVEAEAVLLESDDVASAISEEIGKFNICKLVLGSSSKSIFRRKLKGSKTATKISECIPSFCTAYVISKGKLSFVRSATSDIVETPRSISSSTISSPSTRSLSSCAPSA

SEQ ID NO: 72003 - protein, 421 aa, Zea Mays
MLFACSATKIDNFRSYDTVSKDVIQRWTYPMVPDVVSSRDSSESRLHRQGIYKASDVTLSPSAQIGANSVVGSVTSIAGHCKVLNSVIGQGCKIGKNVLINGSFIWDNVIIEDGCKVSNSLVCDGVHLRAGAVVEPGCVLSFKVEVGKNVVVPAHSKVSLLPQPSNEDSDEELEYADTNSGIADSPPFSSMRSNGDQATVPSEEDELGTSELEELQHAVPDDDRSEDESNNPTLPDKDDSSDSLVEDDDHISKFEKEVEETFQRALGGGVNRDNLILEINGLRLAYSLQHADCAGAVFYSVMKSALLAAQSSNDTLLKTTADALGKWKDLLRNYTKTVDEEMEILLKFEEMCQETTKDFSPLFPKILPYLYDTEVVSEDAILRWAEEKEHADESDKVFVKQSEAFIQWLKEAEEEDDEEEE

SEQ ID NO: 72004 - protein, 131 aa, Zea Mays
MPLWSHLLREELEKLYSFAVSGSPEEKLAASKILCGASLLRGWNIQEHVVQMVLKLLSTFLPLDSGSEGRYVQHMPMLHALVSGISSIDTVHILSLYGLEFSVIANSPLRIDLSCVLDHVVSELTAFLRKL

SEQ ID NO: 72005 - protein, 813 aa, Zea Mays
MGLPADCMLLLKDVVANELWRTVDANGWRASSAPHIYWPHIPAESESNGYLCVRCNGGLTLQISVAGIKECDKSVGNLLYAVATKYPTNALVHRPVLISYVLSTKIKNPAQLDAALSFLTNTGPDSLDVVKFEEACGVGVVVSIEEIKSTVTDVLEENMEAIKEQRYHINVGTLCGQVRKRHPWGDAKAIKEEIDKRLAEILGPKTEADNIKPVKKKKEKPAKVEEKKVAVATAAPPSEEELNPYTIFPQPEENFKVHTEIFFSDGNIWRAHNTKEILEKHLKATGGKVMTRFPPEPNGYLHIGHAKAMFIDFGLAKERNGHCYLRFDDTNPEAEKKEYIDHIQEIVHWMGWEPYKVTYTSDYFQALYEHAVELIQKGLAYVDHQTAEEIKEYREKKMDSPWRGRPIEESLKLFEDMRRGLIAEGAATLRMKQDMQNENKNMSDLIAYRIKFTPHPHAGDKWCVYPSYDYAHCMVDSLENITHSLCTLEFDIRRPSYYWLLVALGLYQPYVWEYSRLNISNTVMSKRKLNRLVTEKWVDGWDDPRLLTLAGLRRRGVSSTAINSFIRGIGITRSDNSLIRVDRLEYHIREELNKTAPRTMVVLRPLKVVITNLEEGKVLDLDGKMWPDASDTDASSHYKVPFSRTVYIEKTDFRLKDSKDYYGLAPGKSVMLRYAFPIKCTDVISGDSPDDIVEIRAEYDPLKTSKLKGVLHWIAEPAPGVEPLKVEVRLFEKLFMSENPAELEDWLGDLNPHSKEVIKDAYAVPSLATAVLGDKFQFERLGYFAVDTDSTPEKLVFNRTVTLRDSFGKAGPK

SEQ ID NO: 72006 - protein, 54 aa, Zea Mays
MFHVSPLKKCLRVPAHVIGISGVNIEPDLTYLEYPIKVLDLKDRVTRRKAIKFY

SEQ ID NO: 72007 - protein, 60 aa, Zea Mays
MSGDHAKKEMGSGEKSISSHGKAPSGESYNKGKGKEKESPSHKSCQSGDKKKKMRKVVYY

SEQ ID NO: 72008 - protein, 51 aa, Zea Mays
MAPCWPRSLTAACSFPALHDRAWPELPLAHPWRRPLISLPSRRSSLDEPPW

SEQ ID NO: 72009 - protein, 123 aa, Zea Mays
MVVQIRHGKAMAPPKNGQGGTGITIQPVQIVTRSNECSFFLLQARTTLSIQARGAKQEQPREFTSCSIFSKSSCAFREEFKERALSKKEEVWIKSAWLWEYFSSMSEHHRAKSDKAAEEECKI

SEQ ID NO: 72010 - protein, 237 aa, Zea Mays
MGANGHPPASTVAQNGSHSGGGGGGGGGVNPSNGGTGAALRHDPGLAREWSTEEQTILDELLVKYASDLPVVRYAKVAMKLPEKTVRDVALRCRWMNKKESAKRKKEDHNSSKKSKDKKVSDSSSKPPVHMVGRPNVPPYPLPVLPMDDDEISSKAIGGPTGEILETNAHVLGQISSNLSNMQDNISLLCQTRDNILRVLKEINDAPDIMKQMPPLPVKINEELVNSLLPRPTVPMQ

SEQ ID NO: 72011 - protein, 221 aa, Zea Mays
MHDKWLEDKGIKNTNFAIVTWSNWDCRIMLESECRFKRIRKPPYFNRWINLRVPFQEVYGDVRCNLKEAVQLAGLTWEGRAHCGLDDARNTARLLALLMHRGFKFSITNSLVWQPAAAPQSTAATCHFSPDRSPDPVVVQLQHQQQQHKPKEALGSPASLVNPSYATPAGGKDRAMYCYCGVLSRWSVVRKPGPMQGRYFFGCGNWTATRRAICPYFAWAS

SEQ ID NO: 72012 - protein, 719 aa, Zea Mays
MDLSRFASGVGPSRVAPRAGLQIGAAENGFRACSLRRARHRGGGNGNLTAAASTLRGRGGLFYLAPTRRSHPSLRLFYLLPTRGSHLSLRARWRPRCQGNDSLAYVDGPLETAKGSGEVDDNVPTSSGSDDDRGLADVDGLREMLQRSRNELEVARVNSTMFEEKAQRISESAIAFKDRADGAQRDVCAAVATVQEIISKEADAKEAVQKATMALSMAEARLQLAAEALEANRGSVGPTEVSIEGMEQEALLSAQEEIKDCRAALSRCAEELSRVQDKKMELQKEVDRLTDLAGKAQMDASNAEEDVANIMVLAEQAVALEMEASQRVNDAEMVLLKAEKAIASIDTVVELPSPAEEQRSTEEDSVSEGYEYSSDVTDDVYVRDEVSSIERLMVGDLTVQGFEQLEPSREIYDEESSNKMSVEPQKEAESDSDKSKQGKKQEMERKEHTKEPLSAPKALVKRSSRFFSASFFSSKVDGEFTPTSVFRGLMKSVQKQAPKLVVGILLLGAGAFFLNRAEKSQLFQQQGIATSIGKVTSTTKPIVLEIRRIPQRVKKLIELLPHQEVNEEEASLFDILYLLLASVIFVPLFQKIPGGSPVLGYLAAGVLIGPYGLSIIRNVHETKAIAEFGVVFLLFNIGLELSVERLSSMKKYVFGLGSAQLIVLPHYQDQQQLLLGVAWLCHPQLLSCKYCKSVVKVRHVMDVLHFLCYCSRIWLWWFC

SEQ ID NO: 72013 - protein, 71 aa, Zea Mays
MQMFMMTCQSFSSRNTRGVTTFPPKRNLVPRFKTLGLVTEKEMRHWLISPILLQSRGVPLLVQTKDKLHKT

SEQ ID NO: 72014 - protein, 373 aa, Zea Mays
MCKYMGIRPFGTDHYLRFMLRKKLQDIKNDDKMIQAEGVESLSEEELRQACRERGHLGLLSTEEMRQQLRDWLDLSLNHAVPSSLLILSRAFTVSGKVKPEEAVVATLSSLPDEVVDTVGTVLPSEDSVSERRRKLEFLEMQEELIKEEEKRKEKEEKAKQEEEEKAKLKETKGSAEDLALKEMIEATAREEELRKAKQHDREKLCNIGRALAVLASASSVSKERQEFLGLVNKEIELYNSMLEKEGAEEAKRAYIAAREESDHHAEAAAEEKISSALIEKVDAMLQELEKEIDDVDAQIGNRWQLLDKDHDGKVTPEEVAAAAAYLKDTIGKEGVQELISNLSKDTEGKILVEDIVKLASQTENNEEEEEAR

SEQ ID NO: 72015 - protein, 80 aa, Zea Mays
MRTRQDNITASERNVFGVSNFFVLFPLSMAMEEQRRPPSSKIAPVSMKASSANATLQGMKNRSHFRRDRKTALQQDVWTS

SEQ ID NO: 72016 - protein, 173 aa, Zea Mays
MSLVKSSFTHATESGSSSSASDVEPQIVPTENAECHGVNPTIGPQEHDQCTTSNGHNMLAIAGQESSQVELWDITSARKIVTLPQTCSANATDHPTKKKGLCMAVQAFIPHESAGYVNILSSYEDGSTLWWDVRKPGLPLSSVKYHSESGVQLYPLLLMDFAMVESQEVLMIK

SEQ ID NO: 72017 - protein, 113 aa, Zea Mays
MGEAHSDEFCHCQGCAGKYALLRDEENPRLAIFERRLPCCGCGIGWSTHTLLLQVLQQGSSRAPWSSCISCCGSHLHSSGNYRSLCGTDNLCIQVVPKARKTRSLDLEFRRNL

SEQ ID NO: 72018 - protein, 183 aa, Zea Mays
MKAARGRRWESRTSAPPSIPPTTKLAAYQTRQLRARSATVMPREGDGGIAARQIRLLARERKEGRSGLSRCKSVLVKNNRPCPGLPGKPVHGVAPFPASNSGSPSPDAISTLRQRFGNRADPDHQRLGWRGFLHAAQIQAIPRLVHGQTSNSVPSEFVKWRDVVVLCSKPVPSSIRSFELMYN

SEQ ID NO: 72019 - protein, 362 aa, Zea Mays
MRGLTRAAKRAGEMAFNAGGGAVNWFPGHMAAASRAIRDRLKLADLVIEVRDARIPLSSANEDLQPVLSAKRRILALNKKDLANPNIMNDCISINAHSSSSVNQLLGFAELKLKEAISKEPTLLIMLVGVPNVGKSALINSIHRIATSRFPAKDKNKRATVGPLPGVTQDIAGYKIATQPSIYVLDTPGVLVPSIPDMETGLKLALTGAVKDSVVGEERIAKYLLSLFNIKKTPLHWERLLHRKEEWCEEICSSNKKDNSLRRTRLNNSDAVYVQDLVTEVQRALCRTFLNFTGNIEEESELETLIDMQLVELRKVFRIPHKPFDETQGPTSKKLLTLFRSGSLGRSSSTTFLMDLRNNLFT

SEQ ID NO: 72020 - protein, 148 aa, Zea Mays
MKAARGRRWESRTSAPPSIPPTTKLAAYQTRQLRARSATVMPREGDGGIAARQIRLLARERKEGRSGLSRCACQEQPAMPGVAREARPRCRTIPRLEFGVSKPGRHQHTPSAIWKPRRSRPSTPRVEGILACRADPGHSPPSTWTNLQ

SEQ ID NO: 72021 - protein, 261 aa, Zea Mays
MQVDTQPFPVNTIDIACKKILVQPKTTDKGKSKDIIIGNPRMSNILQKEIARKASDDKAKKFGGTGGQAQLMSQARQPGLSITDGLTHTCGRSGAQTDGPANSAGQSTYGQRHQPPHKALKGKEMQWQSTYGRLIKADPTFDQLLSKNTRKKTVLHGRSTKKPRSPTKTKRVNKTALKATQQASPIHPMRPGYFPPVYSSSVYYLVQIWNGMMMNPWYMYSPFVYPDWGHLHSILFDPLIKWPWSRKIQSETAFIHWCFIE

SEQ ID NO: 72022 - protein, 284 aa, Zea Mays
MEGAGRDANPLSSYRIGRTLGTGSFGKVKIAEHILTGHKVAIKIINRLKIRSLKMEKKVKREIKLLRLLMHPYIIRLYEVVHTPADIYVVMEYVKKGELFDYIVEKGRLHEQEACRLFQQIISGVEYCHRKMVVHCGLKLDNVLLDSRRNVKIVNFSSSNVMRDGHFLKTTCGSSIYAAPEIISSKLYVGPDVDVWSCGVILYALLCGTLPFDDENILELFYKIKGGIYILPSHLSLSARDLISRMLVVDPMKRITIHGIREHVWFKIQLPRYLAVPPPDTAQQ

SEQ ID NO: 72023 - protein, 414 aa, Zea Mays
MTGRKGKLWIIGIAIPLVAILLCSTFTFLWLRRPKKGVLSSQDRAGANRIEENALVWTIEQKSSEFTLFDLSELLEATKSFAEENRLGQGGFGPVYKGQLSDGQEIAVKRLASHSGQGFTEFRNEVELIAKLQHTNLVRLLGCCIQAEEKILVYEYLPNKSLDFFIFDERQSSLLNWYKRRAIIEGVAQGLLYLHKHSRLRVVHRDLKASNILLDQDMDPKISDFGLARICSSNDAEGNTKRVVGTYGYMSPEYASEGIYSVKSDVFSFGVLLLEILSAKRNSGFHQYGDFLNLLGYLYRSWRLDELSAVLQTWHLWEIGRWLDLVEASISKEMHEAEARRYINIALMCVQENADDRPTMSDVVAALNSESVVLPEPKHPAYFNLRVSKSVESAVVVEACSLNEMTITQDPQGR

SEQ ID NO: 72024 - protein, 62 aa, Zea Mays
MTWPARAPVRHRPTDRRAAPPVFVECMPACMFDVRLTISPFRTSASETEMWGRARRGVPVRA

SEQ ID NO: 72025 - protein, 441 aa, Zea Mays
MFFLESNLGHNRHSRNDVSTKHKSGYEPSDTETEWHESPWNDGALASNRNRLPKDSGRNDQVGTRRQNISPNCTLDYHAEKTSNLRYSRTPPRVTEQRRHPSPFTAVKNESRKKSSRTPPRFRSSMETFSRSSIKARFSRNRSISAPKLRPQEKEHPARAPAFPGSNPVSTHPEREVADNIEEDSHAENCSQEISELIANGKLPNSRYNEYAFTSTESIPAGDIFFSRDCRAPLEKTSTKLNNIDQSFTSDSNVHTENDGTVTQSNLGQPSQFVSARTGLSRTTTKSSYATGRHCQMSTTTTLSSPYSNGKLSGESGKFSEITGKLVGGVMKFTSSKVQNDTWLPCMTGKACRKSRTSNNKKNDESESSFIQKALVIEKIRLFWADKYRPQNLNGFTCHREQVQQLKQSNFAHILFSKVLQDQERDLCAELSSLKFLAIHL

SEQ ID NO: 72026 - protein, 62 aa, Zea Mays
MDQTSRDDGTDSSCRPSPWVSGVASIHCLTTLDSLEVRLPLQQRRSGWCLHRMQLQPLLKRA

SEQ ID NO: 72027 - protein, 223 aa, Zea Mays
MAGGSLRKYLHQQEPHSVPLNLVLKLALDIARGMSYLHSQGILHRDLKSENILLGEDMSVKVADFGISCLESQCGSGKGFTGTYRWMAPEMIKEEHHTRKVDVYSFGIVMWEILTALVPFSDMTPEQAAVAVALKNARPPLPASCPVAISHLIMQCWATNPDKRPQFDDIVAILESYKEALDEDPSFFLSYIPPPPDHGHHHHHQSLLRCFPRSMRRSASLKV

SEQ ID NO: 72028 - protein, 109 aa, Zea Mays
MCTADHHPSRGYSNHRLRVHPRHRVGVGRRHVDIQRRHLPANGHVQASHLIRAERQGVGHAIGAQDRLHRQGSGLHVMAGSPSSYLTTPSGSSRRRLVLSAAMASLFLL

SEQ ID NO: 72029 - protein, 50 aa, Zea Mays
MCMHPLEALGFNAMSPILVITPLLDVTNKKSHTTQIDWSRMTIYKELLHL

SEQ ID NO: 72030 - protein, 84 aa, Zea Mays
MGATSLSPCCAGTLENTSPLHVCQVQGTPIPFQVFKGKGAVEISSLPRALLTDHCKGVGVLVFLLVMTLSHSHQVCSVQSIKCQ

SEQ ID NO: 72031 - protein, 231 aa, Zea Mays
MLETVLRIGVLGEDDTGEESPKNLKIPSRKPSIVCENCLYSLEGNGRIRAFHIMDPKGVLDTLLVFHEKRQGSKVPQPLTNYSVGTKSASSDRINALLGRWEGHSVTKRSGVYGATLVEADTAIVLKMDSNGQLIQDTLSTKFGTGTTTVNWTGSANDNLLQFDGGYEITLLPGGMYMGYPSDISKSVAQLDSFHLEFCWMESPGKRQRLVRTYDSAGLAVSSTYFSETKV

SEQ ID NO: 72032 - protein, 54 aa, Zea Mays
MIHGLPTRKLQEGRDRDWQVVTTERRVQVRQVLGRPSREESGLRTGMRGALREG

SEQ ID NO: 72033 - protein, 476 aa, Zea Mays
MFFHAAVSPSQQPQGINVCDHPEKNPCTYIKYCIDLEGVVSCACPEGMSGDGRKNGRGCCFSCQKHFPLDTVLGVSLVLMVTTTTAASCYCWAVKKRELGRKRAELFRKNGGLLLQQRFSTITSQGEDQYSSKIFSAEELKAATDNYSESRILGRGGQGTVYKGILPDQTVVAIKKSKVFDESQVEQFVNEIAILSQIDHPNVVKLLGCCLETQVPLLVYEFISNGTLFQHIHNRNATRPLTWEDCLRIAAETADALAYLHSASSIPIIHRDIKSSNILLDGNFVAKIADFGASRSVPFDQTHITTLIQGTIGYLDPEYFQSSQLTEKSDVYSFGVVLAELLTRQKPISAARPEDSCNLAMHLVVLFNKGRLLQEIEPHILAEAGEDQCYAVAELSVRCLNVKGEERPAMVVVASVLQELRRSFTIDQAVGIKDESIQENSEQEEKHLHESRSIPSLQSSEVSTQCSMEAKMSSFC

SEQ ID NO: 72034 - protein, 259 aa, Zea Mays
MAARRQGSRRQCAWQSGKPQAARRAGRRRTARRWTATRRLPSDLMDRSWINSRRFSKQHIAGVKSFMKLISKRFADIDEVLCPCRKCLNRIARPKSKIEDHLHIHGMASTYTTWIHHGEAQFDTVINQQADHLEEQYCMNEDISMNESENPEDRLPDMVRELFTAGEEGAHKSMFAVVLEDMEQELHPGASYTRFSFVEIFEEAQWHKLKRKEVENELSHPVDAEAWKDLTKKHNWFQEIPRNIRLGLAHKMVLIRLAK

SEQ ID NO: 72035 - protein, 168 aa, Zea Mays
MSPELPPRPESLAAAAALKFSLRVSSFSAMAAMESTVPRPAGNFLQRMELLQPRPLSSFTQLAQPPCSLSLFPLLAPAQVSHPGPARTPDVVRKSISFSSSAAGHGDALLLLAPSPLPRAPFLRRALAPLPSSSIAGFELGQCVDTRRTPWNSRHNPVHQRRADSSPP

SEQ ID NO: 72036 - protein, 424 aa, Zea Mays
MPAPDGWTKKRGGRSEIVFVSPTGEEIKNKRQLSQYLKAHPGGPAASDFDWGTGDTPRRSARISEKVKVFDSPEGEKIPKRSRNSSGRKGRQGKKEAPETEEAKDAETGQDAPSEDGTKETDVEMKPAEEAKEAPTETDDAEKAADKADDTPAPAPMEEDEKETEKPAEAVVAPLAQSEEKKEDAKPDEPEAVAPAPVSNPTENSAPAPAEPAAVPAPVPETESVAEPAAVLAPAPETKPDAKPAAVPAPAPENKPDAEPAAAAAPVPDTKSVAEPAAAPAPDTKSVAEPAAAAPVPETKLVAESAADAVAAPAPETKSDAEPAAAPVPETKPVAESAADAVAAPAPETKSDAEPAAAADPAPEIKSDAAAADPAPGTKADAAATDAAPGAEPDAAPLENTAADKGGSEESSQPVNNVNNGHST

SEQ ID NO: 72037 - protein, 53 aa, Zea Mays
MHKPARNLSLGFRYPTLVGSYKVSHNNFWNPNTSLVSLAFGSQLLSNYFCVLT

SEQ ID NO: 72038 - protein, 98 aa, Zea Mays
MDLPNAPPVVADPAVAAQVRIMQHMADTMADMHAQMRHERQEMRQEREEMRQERRVQQQQAPLPPPPPPVPPRDKHREFMSHKPPTFASSLDPLHADD

SEQ ID NO: 72039 - protein, 184 aa, Zea Mays
MPPGKKGPRVPRHHADTEPTPTDYEKQRAITIMKNNQMMQRLGIRQLQSMMASIPSGRMNDNAPQESGSLYDGDDIEDSEDEMESLVDKSVASHIPNNGAEISSKNTRASKRVVAPGVQEQPIRVTRRRSATINQESNQNIMAGILSDSCDATNQDCIQRISTVVQPSSPIETESEDPTGDQGE

SEQ ID NO: 72040 - protein, 59 aa, Zea Mays
MCFDRCKFYFLFFPRVGNCFLCAKLNILKASISSSSSDIMVRNYPCQHSAGQVLVNGRP

SEQ ID NO: 72041 - protein, 160 aa, Zea Mays
MITGDQHAIGKETTRRLGMSTKCTLPLLYSEQNKDESLASLPIDELTEKADGLSRVFPEHSVINRVVLTGRAIFQKMKDYTLGFMLLALIWKFDFPPFMVQIIAILNDGSILSPKKLFYVQSLEKTVQDDFQKLSSLYLQVSTISQALNSMTRSRNLAGS

SEQ ID NO: 72042 - protein, 61 aa, Zea Mays
MTLVPRSPKTIPKDSLTVDRLNCVVLGRFRASTVVVVGLYCSQRRSLKLYHAVAVELSPPN

SEQ ID NO: 72043 - protein, 59 aa, Zea Mays
MELCAECVLRYFQYWAQHQSRRCTLNKDSGWLLVPTRNNVKFMQAFLLTPDLCNTKLKA

SEQ ID NO: 72044 - protein, 178 aa, Zea Mays
MPMQPQAPSMTPAAGITTEQIQKYLDENKQLILAILENQNLGKLAECAQYQSQLQKNLLYLAAIADAQPETAMAPPGASPGVGQYMSQVPMFPPRTPLTPQQMLEQQLQQQQAQLLNFSGQMVARPGMVNGMLQAMQVQQAQPSPVMNRPDAGGIASEPSGTESHRTSTGGDNGGGSD

SEQ ID NO: 72045 - protein, 421 aa, Zea Mays
MLVFCGRSFWKRPKHQWGFYCDQFLRFGWHLAELFQVKCVIAAPYFVPYSAPTSFKRQFKQTFPLLYKYFQEAPANTVCWTDIIHWMWALFMESWGSWRNDCLNLSPIPFTDPVTNLPLWHVREESPLLLYGFSKEIVECPGYWPFNAHACGFWFLPMDWQFSCDKCMELSGNINSSFGGMLCANHSSLEHFLTRNAYSSRPIFVGLSSIGRMGFLRNPKAFLMVLKAAIESTDYMFILFSSGYKPLDSAIQSIASSVNESRGVDSPSLGGDSALLFNGRLFCFLGSIPYSWLFPRCAAAIHHAGSGSTAAALLAGIPQVTCPFMMDQFYWSERLQWLGVAPEPLQRQNLVPDNDDALSIHNAADVLVGAIRSALSPETKAQAARIADRLSSEDGIGEALRILKARVLTQNKIISSFIASK

SEQ ID NO: 72046 - protein, 85 aa, Zea Mays
MQGGGRARGVAVGTAVFLALVLVAASVHADAAAAPARRLLGAGGGAAPPSPKLSVSVTKASSIPHCGKTHDPNTPCPPSLSTRTP

SEQ ID NO: 72047 - protein, 106 aa, Zea Mays
MAGAFPCVARAPSSFAVTSHREVSLHASSSRAESFFSSLVMPGVQPALLARICYSLVIASLARDARRPACSARPHLLLTGDSFACRRACRTSFFPTQPRQTPNPGR

SEQ ID NO: 72048 - protein, 121 aa, Zea Mays
MGKLSSVGSNFMASAGSRSTSGGFDEGAKYFDGQILKAPNLHTFTFIELKTATKNFRPDSVLGEGGFGRVYKGWVDEKTMAPTRNGTDMVVAVKKLNSESMQGFEEWQMQYMIVDGVSSSW

SEQ ID NO: 72049 - protein, 226 aa, Zea Mays
MAALTRPARRRRTAPTTTLPAAFSTIPTTPIIVGEGEPPPSWDPVPTPKAMVGKGSPRFNIGGSPKLRRFIPTTSATKKKTSPKCSGAKKSGSSPRVKQRADWNPGLERSLVDILHEFKESGYRGDNGWNSEGWNRMVKEFHVRNKYVSFTKSQIQDKEGQLKRDYKMLKAAKQQSGSTWNEKRNMVEGPPALWENLIVDTWLKGLGIALLLMHRERKNRMSNFRM

SEQ ID NO: 72050 - protein, 294 aa, Zea Mays
MLDDSRLVAVKFLHDSKGDGEEFVNEVMSIGRTSHINIVSLFGFCLEGSKRALIYEYMPNGSLDKYIYSDNPKEVLGWDRLYTIAIGIARGLEYLHHSCNTRIVHFDIKPQNILLDQNFQPKIADFGLAKLCHTKESKLSMTGARGTPGFIAPEVHSRTFGVVSTKSDVYSYGMMLLEMVGGRKNVKSFAQVSSEKYFPHWIYDHFGQNDGLLACEGTPEKEEIAKKMALVGMWCIQILPLHRPTITKVLEMFDRGLDELDMPPRQNFSQTFEDPTYNFNAENMSTSSGTKTQR

SEQ ID NO: 72051 - protein, 483 aa, Zea Mays
MVSGSNLFLFLEHMSRLISSWLRGKKAKYAGRYRITDSDSLDAAMEAAGRIRLTIEAKLSPGPPMLNLRRHGVNGRWHEISDNVASGNFLGAKRRGVVGGIDYGFTGEVKKIDVSRIRERLDRDSIVVVSNMGYSSAGEVLNCNTYEVATACALSIEADKLICIVDGQIFDEHGRVNRFMSIEEADMLIRTRAKQSEIAANYVKVVDEEDINHVRCLPMKHGTEHGMNGRDHINGYTASFRNGVGFNDGNGLSGEQGFAIGGEERLSRSNGYLSELAAAAYVCHGGVQRVHIIDGTVGGALLLELFTRDGVGTMIARDMYEGTRMAREEDLSGIRKIIRPLEESGVLVRRTDQELLEALTSFIVVERDGSIIACAALFPFLEDKSGEVAAIAVSEECRGQGQGDKLLDYVEKKALSLGLEKLFLLTTRTADWFVRRGFKECSFDSLPLVRRKRIDLSRGSKYYMKWLQAAEVGHMAADGFAMR

SEQ ID NO: 72052 - protein, 297 aa, Zea Mays
MDGGSSWLPFLGRGIGDGVSGSSGSEVQRKEDDDLPISSQVEEELRQAMIMHARTLVICNCFTFFFYLLMGMERTGHPAERETTTALPPSSESSMFRSFPGSPADEASSLRPRSSNNNSTTANSYHHHPAEVSSQSHLTELSPVTYGGGHRHCDDHQCYVNLDTILKLDDEFKRCHDEQPHNERAQHKNGFRGGAFVPYTRHLGPKKKPKPPAGSGGQRAIKAAMAALARMHMVRLAQWQCYQMELVVAPAPPTGGINGNNQQQHVLSERKRREKLNDSFKALRTVLPPSSKIRHPH

SEQ ID NO: 72053 - protein, 277 aa, Zea Mays
MLEKQSLSDFIDHINSDKAVIVSVSPQSRASLAAFFGLSQSQVLRKLTALFKSIGVKAVFDTSSSRDLSLIEACNEFVSRYQKNHSCSGQEAGANLPMISSACPGWICYAEKTLGSYILPYISSVKSPQQAIGAAIKHHVVDKLGLKPYDVYHVTVMPCYDKKLEAVRDDFTFSVDGKEVKEVDSVLTTGEVLDLIQSKSIDFKTVEESSLDRLLTNVDEEGHLYGVSGGSGGYAETVFRYGANVIYKREIEGPLDFRILRNSDFREITLEEPAEYC

SEQ ID NO: 72054 - protein, 70 aa, Zea Mays
MAWWRPERRKVTGAGNTVAFTVASLPATTQLSKMAQCDVVNGLRHGATTVNGTSFCDGRLATSPAQVGTA

SEQ ID NO: 72055 - protein, 366 aa, Zea Mays
MRAGSKLFREKKTMERGKLDKGGYSSISGPRVIEKTFSDMSISGSGFGSGSGLGGLSTDMDSFASKPKGRPSTAATAPGKGFGMKLGKTQKTNQFLESLKAEGEVILEDVQPSAVSTRSSALPPSDPVTVNIEEKLNVVVKRDGGISNFDVQGTLALQVLNDTDGFIHLQIESQDMPGLSFKTHPNINKDLFNSQQILGAKDPNRPFPSGQNETPLVKWRIQGMDESSLPLSVNCWPSVSGNETYVNIEYEASEMFDLHNVVISIPLPALREAPSVRQIDGEWKFDSRNSVLEWSILLIDQSNRSGSMEFVVPPADPSSFFPISVGFSASSTFSDLKVTGILPLKEGNPPKFSQRARLLTANYQVV

SEQ ID NO: 72056 - protein, 80 aa, Zea Mays
MFANVSARSARWSSLLLLATTMSSTYVNIFLPTCPLSTILVSREKVDPAFLSPSGILMKQYVPKGVMKLVLALSSSFIYI

SEQ ID NO: 72057 - protein, 72 aa, Zea Mays
MARERREIRRIESAAARQVTFSKRRRGLFKKAEELAVLCDADVALVVFSATGRLSQFASSRREGAQPFIGPL

SEQ ID NO: 72058 - protein, 95 aa, Zea Mays
MGTELVIQIVEQFEALGSTIGLRYLVENIGKIGGAIGIENGNTGEARKWCGVVTSSYGRIAGHHRLRETHLLGRFILHACFRQGLESVCNTSKVC

SEQ ID NO: 72059 - protein, 75 aa, Zea Mays
MTILAGCLMFPVFAVDVMRAFCSPFSFHLYWTAQMLVPLFPSICTGQHRCFFNSFFGCTTHPKFIWNLELQSTFA

SEQ ID NO: 72060 - protein, 226 aa, Zea Mays
MGISQDTHESMATDAANYLCHQLQHLLGPISSATSQSGPWEERSVMVRLTQKLQKSKRNKWWRQRRRKHVAELFQKERADYDRVDQEADEWRAKQIAKDIAKRRVESMQQIARKKTNEERKRLESEQSAACLQENFRRSVRVLQFRRCSSFPRHLPARKRRGRAVFSPSTLQQQRSKFRRRVGQQQQLAANVPLPRPLLLSQLRDKLGARRRGPSASGLYSLCSLQ

SEQ ID NO: 72061 - protein, 124 aa, Zea Mays
MAGAGAGGWKKRVGRYEVGRTIGRGTFAKVKFAVDADTGAAFAIKVLDKETIFTHRMLHQIKREISIMKIVRHPNIVRLNEVLAGRTKIYIVLELVTGGELFDRIVRHGKLRENEARKYFQQLY

SEQ ID NO: 72062 - protein, 201 aa, Zea Mays
MAAALASSRYCWSRPSLPPQPTRGRRSVTSCALSGREKRNSFSWRECAISVALSVGLITGAPTFGPPAYASSLEPVLPDVSVLISGPPIKDPGALLRYALPIDNKAIREVQKPLEDITDSLKVAGVRALDSVERNVRQASKALNNGRSLILAGLAEPKRANGEELLNKLAVGFEELQRIVEDRNRDAVAPKQKELLQYVGT

SEQ ID NO: 72063 - protein, 243 aa, Zea Mays
MELPDERVQVDALERHLLAGLSSNDYDGSFEDEVLYDASFAEMEDNFVKYQIAQWTLLSLLLIVAWGVGVLMLLYLPIGVYVCRRDFRSRKLYLTPHAVIYKVNKPFAFPCFGVSKKEKYWILPSISDVVVEQDYLQSIFGVYSIRIENISVRKPPSCDVKITGVAHPHDFRKAVVVHLLNTRNQKTSSDDQQSTNLNYAASSSEASLGDLMLEKLDEVEISVKVKVAEMLCIALITNKCRLM

SEQ ID NO: 72064 - protein, 151 aa, Zea Mays
MVFGGTRIPQLQMVGVGVPSGGVEPRGGGPPRPPMLARSRDDSDPLAASTFRCSGHLSPSMDFQAAGNEIVPFNFSAVVVRDDRLKSGWSCSLHLQYLCSAIFFSILDGGCGLSLAFTMSRSPPAVGIRLVLVQGDEAWYCTFLVYVFFNW

SEQ ID NO: 72065 - protein, 241 aa, Zea Mays
MPCPACGRGAWRPSSAELSPPLIIDHPAVHLMSREQVFHDMMVASNFAGQMLSRREKATNFKPDYDIDIHMKVLAMSGQVSSILTGYKLKMIHGFTCSHFLLMVCAFVVFSDILKRVPDKLHVTKKAVLHVFPAALPQSLRLSCLCPRRQLSGLDVPFHAAPTSTHTPTVVTPCSSTRRSMVSQPVKTFFAITMYGTANSHFTSVVWKASTNSNALFLIAAAHNLLCLKLGKEIGVSIGNP

SEQ ID NO: 72066 - protein, 484 aa, Zea Mays
MARRALELAAVLLALAALAAVAAGGDIVHQDDEAPKIPGCSNDFVLVKVQTWINKKDKDEFVGVGARFGPKIESKEKHANWTNLLLADPSDCCTPPREKVAGDILLVERGNCKFTTKAKVAESAGASAIIIINDKHELYKMVCETNETNLDIGIHAVLLPKDAGSSLQRSLSSGEVLVELYSPDRPLVDTAEVFLWLMAVGTILCASYWSAWSAREADIEQEKLLKGLQTCLVALLSMSRRFKPAAESYVKVPFFGAVSYLTLAVCPFCILFAVLWGVYRRLPYAWIGQDILGITLIVTVIQIVRIPNLKVGSALLGCAFLYDIFWVFISKMLFHESVMIVVARGDKTDEDGVPMLLKIPRMFDPWGGYSIIGFGDILLPGLLVAFALRYDWAAKKTLQSGYFLWSMVAYGSGLLITYVALNLMDGHGQPALLYIVPFTIGTFLALGMKRGELRNLWTKGQPERVCTHMHPSPKDSPVAVSSLS

SEQ ID NO: 72067 - protein, 182 aa, Zea Mays
MLSGSSIAGSAQGEACLLNYNHMSFGGGPLEVGTEQEAEKLASQNDKDSANEADVLSAPPKLVYNNYVLRLSRELLVAVASGWDKHVVIIDKIIPQAWKVRYLFLIFYVDSSIPSTCITASNYLYVQQSGSNMYLFCILHHCFSHYTVLVNNHSDAYQKLFTVWFEHILILYITPLFFIALK

SEQ ID NO: 72068 - protein, 92 aa, Zea Mays
MCLLFITEVDKAVRWARNHYLSSTALPSIKGDKLIIPHESLDISIERLKEHGITTKKSSQNLKKIGACHMSISQREGRLQFVPLSGTQTATG

SEQ ID NO: 72069 - protein, 121 aa, Zea Mays
MSSTRTEVVRRRPPPPARPLRPTPTRPLGSGQRSSPLLAKRNPPYTAASLSLSRRTSRASQRTPSDPRRASSSPTEGRMAWSEDMAEADEMESRGVQSSASPCRRHKREIGDDDDDTEEEG

SEQ ID NO: 72070 - protein, 60 aa, Zea Mays
MQSYMENLIGANLKYITWDVSDYLHAEAGGSGDSRKSLASKPRMIWTANSMGFGIPALGS

SEQ ID NO: 72071 - protein, 336 aa, Zea Mays
MTFELSVFREYDDDWVLPSADITLVLVGKLGYGKSATGNSILGREAFVSEYSHASVTNTCQLGSTTLKDGRTINVIDTPGLFDMSITSDEAGKEIVKCMNMAKDGIHAVLMVFSATSRFSREDASTVETIKVFFGERIVDHMILVFTYGDLVGESKLKKMLNNAPEYLQNVVELCQNRVVVFDNVTEDRRLQAQQLDKLLDVVDSVCAKNGGKPFSDQMFTSIKEVHDREKEVHTSGYSDEQISELKKEIHRTRDEQLAHITNMVEEKLNCTVEKLQQQLMEEQNARLEAEKVAYEARLKSEAEIQKLKESLKKAQMENDEFRRMAQSQGSKCAIL

SEQ ID NO: 72072 - protein, 53 aa, Zea Mays
MWTKFFLFEPSAKKHLPFFSYAAKHREQHFPLFSEALFFVHEALSSPSFSSFC

SEQ ID NO: 72073 - protein, 50 aa, Zea Mays
MTPGRTHNGLQHDTRPNSPTDGVAIPKQNLNTDLFRRFPLTPDEFLGASS

SEQ ID NO: 72074 - protein, 360 aa, Zea Mays
MSVLTCVIESMGSSCSRSHSFDEAEAAENAKSADIDRRILQETKAEQHIHKLLLLGAGESGKSTIFKQILYEGAKELAQVEPDSSKYVLSPDNQEIGEKLSEIGARLEYPSLNKERVQDVRKLWQDPAIQETYSRGSILQVPDCAQYFMENLDKLSEEDYVPTKEDVLHARVRTNGVVETQFSPLGESKRGGEVYRLYDVGGQRNERRKWIHLFEGVNAVIFCAAISEYDQMLFEDETKNRMMETKELFDWVLKQRCFEKTSFMLFLNKFDIFERKIQKVPLSVCEWFKDYQPTAPGKQEVEHAYEFVKKKFEELYFQSSKPDRVDRVFKIYRTTALDQKLVKKTFKLIDESMRRSREGT

SEQ ID NO: 72075 - protein, 121 aa, Zea Mays
MPLQGTFNSMFDFPMPTADRGVTIYNASSHRNANLARQHRKRVLDQHRLVLRGPPRNIRVPMQCAYLSDDYVAALKASYPRRSNHGTPDYNCQMCGALFWYGERSRGTVRNMSLQYYNCCK

SEQ ID NO: 72076 - protein, 461 aa, Zea Mays
MGDHAEMLHAAPAMYNGAGAAPHGGWWNTAVPATTCSTTELAGFTTWSSALAASYDLAAEGTKAKSAAASSESPGNNSSVTFQEPACVTDPPGVGTAVVQVQQPLATGYADWTHPYIGATTLHGFLQDGHQQDMSSATEQSSMTASSLMNPSSNNLALALQGHHHHHQEHEHQQQMLSSFGSELLLSPTTSPYGFQSSLLRSLMEPAAATKQALPGYQQQQYDQYQQQMGMGQARFAPPAAGAASREALQFSNDALFSWNPSAAGFGFGLGVPPAPDQASSVRSVVKPSPAAARATATLALKTALEGVGESASSIITKKKANGEPALKKPRLETPSPLPTFKVRKEKLGDRITALQQLVAPFGKTDTASVLHETIEYIKFLHDQVGVLSAPYLKNNGHHQVLRHLKSSSPDKSSKDDDSHASEISLKGRGLCLVPISSTFAVASEVPVDFVWSTPFAANFR

SEQ ID NO: 72077 - protein, 320 aa, Zea Mays
MDGCRAVLTGDMQCHEATMSNSSCDSDHLHRERGEQGLISSQLQQQLEQIYMLMDMELEHELHLHHNVPPQGCSQRQLSSPFLPFAVSSDVTSSPVLTSSSTTTFCQQPAEASPSPLDTPFSPLPYSYSDTIPDLEEIMSRPRHKDGHAESGTSAFRQYVRHLRPKKKLKQGGCGQRAIKTAMSVLARMHSSRLSQWQRQISSTEMAAAVPSDESKNIQLLHVRSERKRREKINDSFEALKNALPPSCCKRDKTSILMRARDYINSLKSRVSELEENGKSKLDIHVPFKFKACDDNNFVKQSVSVIQTVKCTMQSEIETP

SEQ ID NO: 72078 - protein, 56 aa, Zea Mays
MFTPVCSLFFPRSPRVRHPPRVTAAALRPAARVALCRRRAPTAPPPYWSLEDCCRW

SEQ ID NO: 72079 - protein, 618 aa, Zea Mays
MARSAEHRTAARRSTAPVLHTTLGVSLEKTRLMQARIDGFVQQMTGLLRLERDAELELAQDHEVSAAGTVMDGMPKKPVVAHGQAQEDGDTICNLRVISSSTGLTGQHLVLFRAEGSHRLPATRLSPGDTVCVRACDSQGEVAASTPCLQASVHNLGEDGRSITVAFRSRRGGEPAFSRFPGKFARIDRIQALADAVTYERNCEALMALQKRGLQKRNASIGVVATLFGDKEDATKPERNSLTDRRGPEAPDGGSLETHSHSFDTSQSRALALALDKERPVLVIQGPPGTGKTRLLSYLVARVVRRGERVLVTAPSNAAVDNMAESLSASGLKNIVRVGNPSRISPSVAPMSLGQIVATRLEKLTREFETRRSALRKDLKRRVQDGGDGSSVRQQLKRLGKDYRKEKKEAVREVLANAEVVLSTNTGAADPLVRGTGGCFDLVIIDEAGQAIEPSCWIPMLQGKRCILAGDHRQLAPVVLSREAMEGGLGMSLLERASSLHDGLLATTLTTQYRMHESIASWASKEMYDGLLRSFPSVASRLLVNYPSVKVTWMTQCALLLLDTRRAYGSLNIDCEESLDPAGTGSFYNNGEADIVAHHVLNLVQCVPLHRASATVTR

SEQ ID NO: 72080 - protein, 71 aa, Zea Mays
MNFSGMALRKLESGQFVEVFSLGCTPDSVRCVTGCTKSCMLQTLQNSLKSFSLYVNVNFMHLKKTFTRQTS

SEQ ID NO: 72081 - protein, 229 aa, Zea Mays
MAGVRCTLGGERGCQVVRVGMGPASTCGSGGAGDGMCGARMAISGWGGGGGIHRSRLSTAVFRVFACLCMHRPDRGLQDLLGSRNRSTLATSLPPFHLGDSTRTAPNLSPTGSAFDSGRTPINQRRLLESNGQIYATLPLFLPHDNRPDPPHLTSPFSFLCLPLYLQQSEVSEATPFGARKGIVSLVLEKSETESIWRLHWCPCQRLKCSRATRGCRRAQGDLPTLSPR

SEQ ID NO: 72082 - protein, 116 aa, Zea Mays
MYQLRQERDMKHETFAILSLGRFQGQPLYKLRPSKFRAAIEEAFLAERGFFYLQTDEVVGKGKDHSLLNPSIVPAMPVSRILIVVAGLWILSVHGSCCNFLTLSYIVLVLYEVTLR

SEQ ID NO: 72083 - protein, 119 aa, Zea Mays
MHRPLFLRIVNAVEQHDDYFQLKRNASHQKELSCLQKATAVFRMLTYGVPADATDEYVRIGESTTLKSLRRFVKAVIDVFEDEYLRTPNDTDTARLLALGEERGFPGMLGSLDCMHWRW

SEQ ID NO: 72084 - protein, 169 aa, Zea Mays
MFSGVGPLAISAAKKVKYVYANDINPNAVGYLERNMVLNKLEKKIEVFNMDARRFVSAIYSSKHVQPITQIVMNLPNDAVEFLDVFKGILCNTKSELHCVMPMIHVYGFSKAEDPEHDFHERINLTLGENIDTVEMHRVRLVAPGKWMICATFTLPQSVASAQPNYITC

SEQ ID NO: 72085 - protein, 115 aa, Zea Mays
MHEPCLTFEAGLVSRWADRQELSIVSLARASELGRAVWNLTTMRCPLQKPRLRFFLLTGTHTNPCARARSTWFDQSRRPNTAIHPDINVDKFAWHGQYEIFIRDAICVQWTNSQS

SEQ ID NO: 72086 - protein, 90 aa, Zea Mays
MRTTTAPFPFCSAPTAAIIAGNTRPPSPCRTRCHVAPTPSPLLRTRAPPRILLAYKTSAPAPSVPIPSKTHQIKSPLPNRKQLHFPPTHP

SEQ ID NO: 72087 - protein, 483 aa, Zea Mays
MGQLFSGQAFHSRSCAQREACGVRRAGGRGRRLERAGREAGGRRRLASDQREEERQVVVRRLPQCHRHGGRRRAYPSLCHVRARLGRGRHGAGPVVGHHGVHAVADGGDARVRAGEAVRPVPRAGAARVRREAGPLDRGAAAAGGGGGPQHRVHDHRRPVPAEVPRHGVPWPVPAHQAPILHHGLRLRALRALPAPRLPLHLQRLARRRRHVGRLLGDRVDRVGGAGEGGGGGGRLQPARHDHAREGVRLPGRAGRCGVHVRRAQRGAGDPGHHPVHAGEAVQEAHVEGRHRRLRRHRRVLPPRRARRLLGLRQRRRREHPHHPEPAAVAHRRRQHDGRRPRRRQLPGVRHAGVRHDRDGAGQEVLVHAGIQAPSHCPDCLRCTHNVRGHHIPLLQRAAQFLRWIRLRTHELLRELPSATLPCIMWLIIYKPRRFSLSWFTNWICIVIGVLLMVLSPIGGLRQMILKIKTYKFYQDYSGLSHN

SEQ ID NO: 72088 - protein, 63 aa, Zea Mays
MRFITPAFTSYVLSMHSCYVSIIVGLLASRASSSIMSWPSSGTSVSPSLCLNTAAVIPAVLKF

SEQ ID NO: 72089 - protein, 576 aa, Zea Mays
MYSLPGATMSAAPARVISSSSSSSFVEPLLLAAASSAAANSHHQVRQRGHLVRTLAASSSSNTLLRSDFDLQEGLTTDVKRMLRQRQKKSGGGREMLVTIDNLKRLCIDHFFEEEIEGAMATGACTRLLHSDDLFDATLAFRLLREAGHDVSAKEDVLRRFIDGVSGDFKLSLNNDVRGLLGLHDMSHLDVGGEEAALLHRAKEFSSSHLASAVRYQDNPSLAEYVRQSLDHPYHLSLTQYKARHHLRYLQSLPSSCRDAAVERLAVAEFQLNKSLHQREMREIKRWWMDLGLAEEIPVVRDQVMKWYMWSMAALQGSSFSRYRVYVVDDIFDLVGTLEELSAFTEAVKMWDTAAADSLPSCMRSCYKALHTVTNEIAEIAHKEHGSNPINRLRKAWVVLFDGFMVEARWLATDQVPTAEDYLRNGVVTSGVPLTFLHIFSMLGYDDPSTEEEEEAIIDHMPSIISCPAKILRLWDDMGSAEVVDEAQEGFDGSYRDFYLMENPSRSPGEAEAHMRGLIAREWVELNRECFCRRTFPSDIAQVCLNTARMVSVMYSYNKEQRLLVLEDYAAMMLVL

SEQ ID NO: 72090 - protein, 415 aa, Zea Mays
MSKLLHKAIREKRDNAYTVYQQHLASRPVNVLRDLLELKSDRAPIPIGKVESATSIVERFCTGGMSLGAISRETHEAIAIAMNRIGGKSNSGEGGEDPIRWNPLTDVVDGYSPTLPHLKGLQNGDTATSAIKQVASGRFGVTPTFLVNADQIEIKIAQGAKPGEGGQLPGKKVSAYIARLRNSKPGVPLISPPPHHDIYSIEDLAQLIYDLHQINPKAKVSVKLVSEAGIGTVASGVSKANADIIQISGHDGGTGASPISSIKHAGGPWELGLTETNQTLIQNGLRERVVLRVDGGFRSGQDVLIAAAMGADEYGFGSVAMIATGCVMARICHTNNCPVGVASQREELRARFPGVPGDLVNYFLFVAEEVRAALAQLGYEKLDDIIGRTDLLKPKHISLVKTQHIDLGYLLSLPN

SEQ ID NO: 72091 - protein, 648 aa, Zea Mays
MPQIPNQLHADIKADSERFCVQEAGKPCDPRVSLLLEVAAGFMYPKALATDWKGNDPCVFPGVSCIQGNITELIFTNKGLSGSISPSIGKISSLKVLNLANNNITGTVPEEVAALPSLTEVDLSNNNLYGKLPTFASKSAVVKTAGNPNIGKDAPAPTAGSGGSNDSLSGGGSSGSIGNNGGSSPSSVGVIVGSVAGTVVGLGLVAALGFYCYKRKQKPFGRVQSPHAMVIHPRHSGSDDMVKITVAGGNANDGARASETYSQASNGPRDIHVVESGNMVISIQVLRNVTNNFSEENILGRGGFGTVYKGELHDGTKIAVKRMEAGVMGNKGLNEFKSEIAVLTKVRHRNLVSLLGYCLDGNERILVYEYMPQGALSQHLFEWSEKNLRPLEWKKRLSIALDVARGVEYLHSLAQQTFIHRDLKPSNILLGDDMKAKVADFGLVRLAPADGKCVSVETRLAGTFGYLAPEYAVTGRVTTKADVFSFGVILMELITGRKALDETQPEDSMHLVTWFRRTQLNKETFRKAIDPVIDLDEETYASVSTVSELAGHCCAREAHQRPDMGHAVNVLSTLSEVWKPADPDSDDSYGIDLNMSLPQALKRWQAFEDSSHFDGATSSFVASLDNTQTSIPTRPPGFADSFTSADGR

SEQ ID NO: 72092 - protein, 878 aa, Zea Mays
MVMVATGCISMILAWSVLISILAVGGAATASDEAALLAFRAGLSPGALASWNSSGGFCRWYGVVCSRRRRPGRVRVVALSLASSNLSGTLSPAIGNLTFLRVLNLSSNALHGGIPETVGRLRRLTALDVGHNSISGALPANLSSCVSLEYLRLEYNQLGGRVPPDIGNTLARLRTLVLRNNSFTGPVPASLANLSSLRYLAVDGNHLGGPIPPGLGGIAGLQHLHLDQNRLDGELPRSLWNLSSLVAFQVNYNMLHGSIPPDIGDKLPAIQYLWLDGNRFSGAIPPSLFNLSGLVSLGLSLNGFTGLVPPTIGSLRSVTSLYLGENQLEADDGGGWEFVASLANCSSLQVLTLSDNYFSGQLPRAVANLSTTLQQLYLHNNSISGSIPEGIGNLVGLDLLSLGINPISGVIPESLGRLTNLVTLGLYSTSLAGHIPASLGNLTNLVYLDAHNSDLGGLIPASLGKLHKLVLLDLSHSRLNGSVPREILELSSLSLSLDLSNNFLSGPIPSEVGALANLNTLSLSGNQFTGNIPDSIGGCEVLEFLSLDRNTLDGGLPQSLGKLKGLNVLNLTMNSLSGRIPDALGSIGNLQQLGLAHNRFSGPVPETLQSLKLLWSLDVSFNDLRGRLPDEGVFRNLTYTTVEGNGGLCGGIPSLLLPPCPALAASMGRKRWPRILNTALPVIGAVVVVFVSAAVLVLVRQTKLKQRRKREAVSEVNDKQFQRVSYHTLSRGTDGFSEANLLGRGRYGSVYRCTLEEEEEGAGAAATVAVKVFNLQQSGSSKSFEAECETLRRVRHRCLLKIVTCCSSAGPQGEEFKALVFEFMANGSLDDWIHPRSSNPTAENTLSLSQRLGIAADIFDALDYLHNHSHPSIVHCDL

SEQ ID NO: 72093 - protein, 212 aa, Zea Mays
MYMDLPNTLDFCKQPKILSDKKKMADAEDIQPLVCDNGTGMVKAGFAGDDAPRAVFPSIVGRPRHTGVMVGMGQKDAYVGDEAQSKRGILTLKYPIEHGIVSNWDDMEKIWHHTFYNELRVAPEEHPVLLTEAPLNPKANREKMTQIMFETFNTPAMYVAIQTVLSLYASGRTTDFRDYLYRNFRYSVEKTEGLGVFRTHVLTGLARCILVQ

SEQ ID NO: 72094 - protein, 70 aa, Zea Mays
MANRSSTEAEAIVEQEMRRSTTRCPIWRARRKGGHRSRCSDMKYLLTSTTEVGELPTVGPTASRGTRARV

SEQ ID NO: 72095 - protein, 93 aa, Zea Mays
MKIVKTILRNRIGNQFMNDCIICFVEPAMIATISDAVIIDRFQKMKNRPQNASMRVQLVPLVVMIEHRPQATGYFVCAMRWSPKHKRSEWQHR

SEQ ID NO: 72096 - protein, 58 aa, Zea Mays
MKCIMHMNAYNKNSTRQTIATRQRIKHLAARCCTISYGNTSYRHTTKRNNHKIINYTY

SEQ ID NO: 72097 - protein, 69 aa, Zea Mays
MIFLTMATCLCPSFFGFADDCIFVYEGLSIPVLFSYAGCKIYITRPVRSASIILSLRVALPLRGASGPR

SEQ ID NO: 72098 - protein, 213 aa, Zea Mays
MRPCLSSAVKIQANEFRKEDFKGSKWLIVRYAQQNMEQIVEAIRIAKQEGLSVSLDLASFEMVRDSRSKLVNLLETGNIDLCFANEDEAREVIGGSLESDPEEALAFLGKYCKWAVVTLASKGCMAKHGKQVVRVPAIGESNAVDTTGAGDLFASGFLYGLVKGLPLEECCKVGACSGGSVTRALGGEVRPENWQWMYKQMHARGLLLPELKN

SEQ ID NO: 72099 - protein, 54 aa, Zea Mays
MFCFKTKVMLQWVGMFSKIKLDGGSITVVMGSTSEKMYLCQVPDFGLKLIKLRP

SEQ ID NO: 72100 - protein, 326 aa, Zea Mays
MAIDHIVRAALRHRGNRKQSSAMPPYAPREQRHDGPPGEVPPMSAKDVTAIEALLGYCFIDKSLVELALTHGSFYWPNRPGDTYERLEYLGDGVLTCLMSREVFRTYRTLQPGPLTRLRAANVDTEKLARVAVHRGLHRFLRHKAPKLQDQICFFIEEMRKYPVHSNGLLDPPKVLCDIVESLIGAIYLDSNFDQEEVFRTLADPLIGLETLGKHPVSELFEFCQKTHRGVKFLKDEWDKSLKVQVLIDGEVVGSAIYGPKKEIAQNRAAKDALDKLKDTHGHTQSESASVDVSEALDELDNTQSESASVDVSEALDELDIAGTLN

SEQ ID NO: 72101 - protein, 823 aa, Zea Mays
MQKSWWQMQILVIVLNFSQRLKLRKNNWESETYEFDELLTEFSSQKRVYEVVAKPVVESVMEGYNGTVMAYGQTGTGKTFTLGRLGEEDTAARGIMVRAMEDILADITPGTDSVSVSYLQLYMEMIQDLLDPVNDNIAIVEDPRTGDVSLPGATVVEVRDQKSFVDLLRVGEAHRVAANTKLNTESSRSHAILMVNVRRSVKGRTEMDVSISGENGHSLSMMGSLRPPVVRKSKLVVVDLAGSERIDKSGSEGHTLEEAKSINLSLSALGKCINALAESSPHVPVRDSKLTRLLKDSFGGTARTSLVVTIGPSPRHRGETTSTIMFGQRAMKVENMVKLKEEFDYKSLCRRLDIELDKLIAENERQRKYFDDEVERIRDEAQCRIAEAERECKITLENEKTKCHQEYLDSIRILEEKWKVHQQSPKKQNEEAESTSNDTREVHNLLQNEKMLRQSAEDEASDLKNQVSHWKKLEATATAEVVKLRKMLDTEASQKEKLEAEIDILRSQLLQMSMEADETGSLDKGNGPGKIFPGLDSLVSQTRSSQFREQSNGPKQPIAKLFEQVGLQKILSLLESEEPDVRVHAVKVVANLAAEEANQEKIVEAGGLTSLLMLLRSSEDETIRRVAAGAIANLAMNETNQDLIMAEGGVTLLSMTASDAEDPQTLRMVAGAIANLCGNDKLQIRLRGEGGIKALLGMVRCGHPDVLAQVARGIANFAKCESRAATQGNKVGKSLLIDDGSLPWIVKNANNEAAPIRRHIELALCHLAQHEVNSNDIINEGALWELVRISRDCSREDIRKLAYRTLTSSPTLQAEMRRLGIKL

SEQ ID NO: 72102 - protein, 1254 aa, Zea Mays
MASAPFPPVAASAASAPPRLAPRHPFAAAAAARRSSLSFRPAARRPVLPLRSSAVAANTLRCTHRRAVSSRSRRRAQELGAAPALAASTWGVGEEKGGCLSCFPKSRRGRSGLARFAPCALPHASGLSFRSRLSGSKVKPSHILHAAGPDEPHVASPTWSDTSLDTRDMDHAISKEELEDVLNTPLPEHPKLIRGQLKNGLRYLILPNKVPANRFEAHMEVHVGSIDEEEDEQGIAHMIEHVAFLGSKKREKLLGTGARSNAYTDFHHTVFHIHSPTKTKEYGEDLLPSVLDALNEIAFHPKFSSSRVEKERRAILSELQMMNTIEYRVDCQLLQHLHSENKLSNRFPIGLEEQIQKWDPEKIRRFHERWYYPANATLYLVGEIDDIPRAVREIEAVFEHTLSENEGNPVPSTSPFGAMASLFAPKLPSGFTTNLTGEKSPATDKIKPVKRERQAVRPPVEHKWSLPEVAQDAKPPAIFQHELIQSFSINMFCKIPVSKVQTYKDLRSVLMKRIFLSALHFRINTRYKSSNPPFTSVELDHSDSGREGCTVTTLTVTAEPQNWRSAIKVAVHEVRRLKEFGVTMGEMTRYMDALIKDSEQLAMMIDSVPSVDNLDFIMESDALGHTVMDQLQGHESLLAVAETVTLEEVNTVGAEVLEFISDFGKPNAPLPAAIVACVPKKVHVDDIGETEFEIYPEEITEAIKAGLEEPIYPEPELEVPKELITQSKLDELKLQHNPSFVPLTKEENAVKVFDSETGISQRRLSNGISINYKITQNEARVGVMRLIVGGGRATEDSESKGSVIVGVRSLSEGGCVGNFSREQVELFCVNNLINCSLESNEEFIFMEFRFALRDNGMRAAFQLLHMVLEHNVWLEDAFDRAIQLYLSYYRSIPKSLERSTAHKLMLAMLNHDERFVEPSPHSLQKLTLQSVKDAVMNQFVGSNMEVSIVGDFTEEEVESCVLDYLGTVRASSSPTIEERIEKISFRPFPSDVHFQQVYIKDTDERACAYIAGPAPNRWGFATEGNDLFNVIQRSDADEISEPVSLDLTGKRHINVRSHPLFFGITLSLLAEIINSRLFTTVRDSMGLTYDVSFELNLFDKLDLGWYVIAVTSTPSKVHKAVDACKGVLRGLHSSRIVERELDRAKRTLLMKHEAETKTNAYWLGLLAHLQSSSVPRKDVSCIKELTTLYENATIEDLYIAYEHLKVDDSSLFACIGIAGAESGEDTNDDEPDVDLHGMGPMGGRGLSTMTRPTT

SEQ ID NO: 72103 - protein, 95 aa, Zea Mays
MIAAAKDIGAAKLNGEDPRDFLAGLASNIGLDKFRAATLVCASVATRTRTCFLQCWALEIQGKRPEALDELVKICRIHYIFPPEDNSRWKWWLLD

SEQ ID NO: 72104 - protein, 159 aa, Zea Mays
MDRSVLYDQTSRSFARVLILPPPPLPAASGGEDDAAWVRAISAATKSTSAPKTLTLDGTVKSSMGGLPSAALLERFATSLEELSIAGVRLSSLTGLPRLPALRCLSLPDNRLSGSAALAAVAESCGATLRHLDLGNNRFAEVQELAPLAGVRVESLDLF

SEQ ID NO: 72105 - protein, 215 aa, Zea Mays
MSDVENPGVGGKPPPYKDPDNGSQRFLLELEFVQCLANPTYIHYLAQNRYFEDEAFIGYLKYLKYWQRPEYIKYIMYPHCLFFLELLQNANFRNAMAHPTNKELAHRQQYFFWKNYRNNRLKHIIPRPPPEPAPSQAPATLPLQASVPTPVAPPVPAPTSSMPPVVAGGASAMSPMQFVGTPGTNMPKNDMRNAMDNRKRKYAPPPSLIFGPLSQ

SEQ ID NO: 72106 - protein, 51 aa, Zea Mays
MFVANRRCQTSPVLLYKDPPSLATISRTSGLYSLEAEWSSTPGPLLEMILL

SEQ ID NO: 72107 - protein, 65 aa, Zea Mays
MGSILSGVGQRIRSSYETTFNFIFKKHELKAARVELQAKIFILPTVDVSPATQATEKRYRSSTQE

SEQ ID NO: 72108 - protein, 165 aa, Zea Mays
MDALTNSNQKKVKDSWRIVNHRDIIPTVPRLMGYCHVEAPVYLKFGDAKDAPVSMFYCTRPPVVTKNIKLHLYVIQVNNSILDDEDQGDVIGEYTPDVLVTEFMKGEKQLVEKLLQTEINLLRSIRDGSALMQHMEDFYYVTLLENVRSSYQVADTANDEYQLTA

SEQ ID NO: 72109 - protein, 386 aa, Zea Mays
MPPPPPPPLGLRLRLSLLPPHPIAPSIRHAFCSPSVVSCHLSVRPLAQRRGGRPRPLCAARGEAEAEGFAWPDGSEEELRRLLELLPRELSRRVETHPELPALVEVVMDLGRPPLARFPSGDFLLSQRPISFDDLRHATSHSQVGDFGADNRAGISRTLHRISAIRNRKGVIVGLTCRVGRAVPGSANLLQDLVKDGGSLLLIGPPGVGKTTVIREIARMLADDYKKRVMIVDTSNEIGGDGDIPHPGIGNARRLQVPNQDMQHKVLIEAVENHMPQAIVIDEIGTKLEAMAASTIAQRGIQLVATAHGVTIENLIMNPSLEMLVGGIQSVTLGDEEANRRGVQKTVLERKGPSTFTCAAEIVSKKELRVHRSLEATVDALLAVTL

SEQ ID NO: 72110 - protein, 80 aa, Zea Mays
MVLGVKLSSLPDRRQGTNREERLLSGRTLRTSARLRASNSRKWTAVSRAEFLRTDRSRCEALIESVIAGELDLAWHGAVV

SEQ ID NO: 72111 - protein, 199 aa, Zea Mays
MFISCALLFFLPGARSLLSGLHAHRVQLPPPAVSAARPSLELRSASNSGARPSSLLPLFITLYGWSLENMHQGYPKETLVRFLKAREWNVAKAHKMIVECLNWRIQNEIDSVLERPIAPVDLYKSIRDSQLIGLSRYTKEILLYNFDGGTICSVVILKEWLGIHRVAAAEISKVWVSQFLALVLGIAHMTKLRIPALIK

SEQ ID NO: 72112 - protein, 161 aa, Zea Mays
MVGLGWRVGSKVQRWGRSCLRGFSSAAVPSQLENVGFIGLGNMGSHMARNLITAGYKVTVHDINENSMKKFSEDGIPTKQSPLEVSESSDVIITMLPSSTHVLEVYNGPNGLLCRGERLGPWLYIDSSTVDPQTSRKISTAISRCLLKEKKGKFHHITVKT

SEQ ID NO: 72113 - protein, 370 aa, Zea Mays
MRALVRIHLPTAISTGSFLHTSSTAASKTLVPNPNLVPLRLVRHFPAMAATAADEFVKGRVFPNGVAVITLDRPKALNAMNLEMDVRYKALLDEWETNPSVKCILVESSSSRAFSAGHGRYRIITERTLLAMPENGIGLFPDVGFAYIGAKAPGGGAVGVYLGITGKRISSPADAMFIGLGTHYVPSANLGSLKESLLSANFTNDPHRDVESVLTGYKKEPESEPQLKKLLPYIISSFSPDKSVAESVEELKKCSRSGDAAVAEWANEALAGIEKGAPFSLCLTQKHFSQVASAYGTSEHYLSKLAGVMKLEYRIALRSSIRNDFVEGVRAVLVDKDQNPKWNPATLEEVNMAEVESVFEPLGAEAELSV

SEQ ID NO: 72114 - protein, 160 aa, Zea Mays
MAPTTCLRIPFLPARGRSANVNAPPSWLPRRLSLKSSATNGPFTSADVMGADWKGLKVAYQGCAGAYSEAAAKKAYPNCEAVPCEHFDTAFQAVQNWVVDRAVLPLENSLGGSIHRNYDLLVQHSLHIVGEVRLEVHHCLLANPGVKIENLKSVMSHPQD

SEQ ID NO: 72115 - protein, 776 aa, Zea Mays
MVIPSNKESAVANKNLEGDAKSDDDLIDGTADNVVSGPKIANMVVDEVGFKMAPANRSSPGDPSDDSCVIPESRPQDYAVKSYEGVGDCGVTEVSKLCSEPLNKPSDNICATQDVPTNTSTMSAGASEVSSSWSEPVTELIDDRCATQGVPANASTTSTVVPSVKLWTNAGLFGLEPSKPPVFGNGPREDTPPGFKEAQPVHSTEFTEVHCSKPTESAAVDVPNGNTSITSSFVEKLVGIRPGSANLNSSGANQSAARIPDPIHSHTDGHSDFSSSFEHNNMTGKHTSISELLEFEGSADTGTKIYSTDMRNNAVSASSFSSIAQRFLANTLQRRTSKYTDLPMSSERANADTSAKSESTLNPVVEPSEAVFAEETKFENKTENGMDGLSKTSIFSSRHYSEKSSPPLEYMKISFHPMSAFEMSKLNLDFCDGNIHEISDDMMLPTFQLLSESSIPQPGSGSESEDDTFGRSYSYSSYDDLSPRLYSNSEAWDQDDGTGLEEHELYDDSNQIGSSTAPLSSYMGFEQMNLSDMKSDISLANIGDQNVIGTLQSCTVEELPNFDTLMSRSDDQNGETPIPHNLGNMTPDEDQLPPPPPLPPMQWRMTRQTTSLEEETCITTKDMLRKTSSLPHIHTSAQEEHCPPTAPLDLQGHAGEVGVQKTGGVREITNPPSIIDIKSSLLQQIRDKSEQLKLNGHERSKKAVGGDIKSLDEREELLQQIRSKTFNLRRTNASKADGSSQSTASSNVAAILEKANAIRQAVASDEGGDDDTWSDI

SEQ ID NO: 72116 - protein, 501 aa, Zea Mays
MMKIVKKKADMQVRDKILMLLDSWQDAFGGPGGKHPHYYWAYAELKRSGVEFPKRSPDAASMFISPVTQPESLPTYLQAGYGMPVDSSSRLDEAMSSNGAPLSISDLERMLGAVELLNEMLRAVNPNEKDAANDEIITELVTQCRSYQKKIMSSVSLVRDEDLLGQALDLNDRLQILLEKHDSIASCSPSSADVIDVVCEVPSGTAPNQGTNFPPQAALRTAIVPTNVLDDEDEENEDDEFSMLARRNSRFQPTNTQSTSSPTVHDETASSTASVPYTASPSVANNALPPHDPPAPPVRVSPEEQVMSDLLALTVSSNPSPSSYTPVTPEPGRLNQSSAPTGELPRAYHGDQGHVSAPYVAPWAQPQSQTAGSQQPTRTQAQVSYSSYAYPPPPWASQDSTESNPFVAAASSSQQYQSTSRTPTMPPNLRPLLQQSHSFGVPLPTASLDSPINGNLKQPLSAGARRPSYVSSNKFFDDLFERNSDGSLKVGSTRHSDVYGK

SEQ ID NO: 72117 - protein, 153 aa, Zea Mays
MPMNSYARQSQPPPSIWDKPTILRMAGLSGPGLGPPDPLEGGCSLYGEPPRAARGPSCSSQGLTDMLRPSSYTRRLSEYAGPLDKEYTEHSTACQAQFSYSTPPAAHCSHSMPPPAHEAEYFGPYEARKIHPIPHDNGMQYWYALGAFTESHL

SEQ ID NO: 72118 - protein, 103 aa, Zea Mays
MWWCRHVLSDIRIAFCTHDPKMEQEKLEKLARKGPSSGEQPSSTTVSAASDVKTGAGPTESASANVSTDKNRNYAVLAGTIAALSGLGWYLLSKPKKSEEVVD

SEQ ID NO: 72119 - protein, 98 aa, Zea Mays
MSQIWVFEYCSLIWNPGITHDACVVGFVGTTTTSCTKVTSTLLTCLWVQSVRLHGHALKLFFLQRWVDREYGTQGHAAVPREDRHARAPARSDLRLMT

SEQ ID NO: 72120 - protein, 297 aa, Zea Mays
MGPGGELRYPSYPTEKLNQPGSSSELGEFQCYDKFMQASLSARAQIFVLQQWGNGGSTGTDGSQQNLEETSFFRTDGGYWNTPYGHFFLKWYSGMLLLHGERLCMIADAIFSGTGVTISGKVAGIHWHYYTCSHPSELTSGYYNTLLRDGYLPIAQMFAKYKATLCCSCFDLRDAERTNSESSPEGTLRQLAGAAKMCNLPLNGENSATRLDDASLNQVIRSSRLYSGRTSGTSFSFNYVRMNKSLFEFHNWNRFTKFVRQMSDARTFLARLYVRRGQQYLSSMSVVWVVSRACAYT

SEQ ID NO: 72121 - protein, 85 aa, Zea Mays
MPSGCFPVYLTMYVDPKEGHGSRTTHMKRLVGEHDSYLRGTTGGACVPIALSGSRFLALQFTGLGGLAGWSCELQPAEMILKSWL

SEQ ID NO: 72122 - protein, 99 aa, Zea Mays
MKITDHQSAQQSIHSRPLSIRIICDHIARPKCLEQNLMEQGDNQKSQGTRGKHAMLTCRAPRRRGRCNCGCRSRGWRHGAYATTCRRTWGRTQCGVESE

SEQ ID NO: 72123 - protein, 310 aa, Zea Mays
MSTSGDGRTWRGRSSSSRDNLVEDLLGDFEYQLQAPYIMYRNAAQEVIGIWFYNSQECQEVANLFSRILNAFSKVPPKPKIPPVQSEFEEVEAAPVLVDGPLEPQTSNIMSTTTHIQEDPLSAFFSAAANAGGNSAVAVARQPIQLFGATPVATHAATSITTIQSPGLHYLLPSQASSVSGMPADAHGSIGRSTNLVNPSLFSPLTSSQTTMVCTNSVVAIAPPQHPQTAQQPQSAPLLQPFLLPTASPSPPYGTPLLQPFPPPNPSPSLASAPVLSPALSRDKVRDALLRLVENDEFIDLVYGEIMNRQ

SEQ ID NO: 72124 - protein, 53 aa, Zea Mays
MQCCCHHNTSTDASTLPMLFIKGYRYKCSLNSFHIVMCLGAQFIHVKLDCMGT

SEQ ID NO: 72125 - protein, 165 aa, Zea Mays
MLLRLKIVVGVHSVVLPVPVRGGFGHGACYAALEPCWRRSRRPALAAAGGLVTRRPRSATVVMALKEEPEGSRRGFVGSGPSCDPGLEIQVPSDPFLLWIRKESLNVGDHIYSWKATCFLSFQVVDAKVIHLGYNNSCIFLSLKDVKFHPSISETTHYALDSFPH

SEQ ID NO: 72126 - protein, 213 aa, Zea Mays
MREVADLILSFPDETPVVVLSAMGKTTNNLLLAGENAVSCGAPKASEIPKLAVIKDLHLRTVDELGLDKSIVSEKFLKYFWWCWNKLKEKTDDDIPMPAYFRFLALLAFKIFSAEQVDVAVLEVGLGGKFDATNVVKAPVVCGISSLGYDHMEILGDQILFLVINLVSINGLLVLMNVMLSRNKELLSAPNRLKWKCLTHCLIRGEAEGGLIR

SEQ ID NO: 72127 - protein, 54 aa, Zea Mays
MIELCMLNIFLISQSIAYPVKQISKVIFSSWIIVILCFHAKYNFRSMHVRACSL

SEQ ID NO: 72128 - protein, 150 aa, Zea Mays
MTAIGGHSGVPATYSRLKQLFYWPSMKATMKSYVQSCTVCQQAKPDRARYPGSLQPLPVPPQAWHSVTLDFIEGLPRSGQHNCILVVVDRFSKYGHFLPLQHPFTASKVAKVFLDNIYKLHGLSVNIISDRDRVFTSGFWQHLFHLTDTK

SEQ ID NO: 72129 - protein, 1546 aa, Zea Mays
MCSDMSGQRHHHATSRENAPEDNGYHRTPHGADHLEQSQAADTDNKHINHLSTDDNVPSSASGHKHGAISRHPSTSSVDDRSIKSGDDSDGAESTSGRSSNTEISFMNNDTIWIPPQAADKEDEAQSFATSIAYDDDDDDYSDGIKWGQSSFPSPGKQHDADTSNHREEREKAMLEAMNGQLKVLVSRFLASAGIPSSNEEGSDSWLDIVTSLSWEAALLIKPDGSMGKEMDPGSYIKVKCVASGTRRQSEVIKGLVFKKNTAHKHMPTNCHNPRLLLLKGVLGHSDIGLSSFSSMDQEKDLLERAIGKMMEICSPNVVLVEKTVSRNIQELLLKEVLDKPKLKQCDYFHIEKFIEEHNNASEGGKMPSKTLMFLEGFPRPLGCTILLKGANSEELKKVKQVMHFTVFAAYHLILETSFFEDQRVFLNDKSTPKEISVTATEGASPTAYDVAALSGAIPSFPSHGDPPALRLFHATSNSYADVNKPLTYPENGDAFSSVSSSSANDLEQGTSIRPNNAERLTSLVQGPLRKLFTDMLRHQNIYLPVTSLQEANDISKEVRAESSQETVINGFHRPEIEESVVSIENGDSINDAQKQEIAQAIMPRGSSANDKDAESSVMGDNGAHSTSIIIKEKYVDDDQADDALDSHSILILMSSQCPEKQVICEQSHLTRIKYYGSFDVSLGRYLQDILQNQKLSCSSCGEPPESHMYSYTHRNGNLTVLVKHLVPQHHLPGESEGKVWMWTRCSRCDHEHGVSKPTPRVLISAEARNLSFGKFLELSFSSHSAARRLGSKVAMFRYSSVEIYTTCKPQPTLQFVNPIRQDWFEGQRRNNLKNEHPDAITLAIHCGLAFPVKDFTELEELLIKEKAQFESSVDKATDQNGVPTSSVHELLNINWYYQDLLLELYIWDRRLHQLFYCKSVKLESVSNYKNLADTVDGICGDKFGVDKKIDEFTYDETTAALGVASTTEPASNKLDHQSGDAAASLLDESQEAGHSEIPCNGGSKAEKSSIAHGQIKVDGTTKTGNDPCFEISNDKKVQVNLTVADPISMEQERCSTLQQFKYPYWDDRERWIWNSISESQLAYRNDIQIGYLEKFELINNYLPHYLPPLFEQHDDADSPHFAVGPGGNILCIMEDEISSIIARALAISDERRHLIDLKFENGMDYSKGEHAKAMEKSYSFLSENSFTSSPWSSTDSEASLSSLSSFSSFSSDDFSGYDSSSLLSSMHPEMTVNGKITLKGKYSVTVVYDNQFFALRKKCCPSELAYITSLSRCKKWNAQGGKSKAYFAKTTDDRFIIKQIKKTEFDSFIKFAPDYFRHVYHSLDTGSQTCLAKILGIYQVKQIRHGKEVKIDLMVMENLLFGHNISRIYDLKGVTFSRRVTDSNDHDTVYLDQNYVEDMGFSPIYIGGRTKHLLQRAIWNDTSFLTSVNVMDYSLLVGVDKEKHELVFGIIDYLRQYTWDKQLETWVKTSLVVPKNVSPTVISPKEYKKRFRKFMAKYFLSVPDTWSSDNSSNPCKSFGQSNHKLAEVHNGDSLLQHPNEAEGCV

SEQ ID NO: 72130 - protein, 402 aa, Zea Mays
MDPAIIALHESILASPHRTLNGDEADYFYVPVLDSCLITRSDDAPHLLLPRDLRRRSYHALEYYRMAHGHIAQQYPYWNRTSGRDHIWFFSWDEGACYAPKEIWKSMMLVHWGNTNTKHKNSTTAYWADNWDDIPLDKRGNHPCFDPRKDLVLPAWKEPNPGAIWLKLWARPRNNRTTLFYFNGNLGSAYEGGRPEDTYSMGIRQKLAAEFGSTPNKQGRLGRQHAADVTVTYLRTEKYYEELASSVFCGVLPGDGWSGRMEDSMLQGCIPVIIQDGIFLPYENVLNYNSFAVRIQEDDIPGLISTLRGINDTQVEFMLGNVRQMWQRFFYRDSILLEAQRQKKLFSEEAPWSVEVSKLPDDDDVFATFIQVLHYKLYNDPWRQDFLQTKDTRLPNICSRTS

SEQ ID NO: 72131 - protein, 69 aa, Zea Mays
MAPSPLPMSSSPNQSSPSQVLCSPSLSSSLVLGAQASMSLQHARRCPYPHGRPTSSVSPWRYPATRPQA

SEQ ID NO: 72132 - protein, 60 aa, Zea Mays
MSIRYLGTICFCCVRFIIGASFVMVSWLMTYGAAAKLRASYECAHRVVLLVGCWYQGLWS

SEQ ID NO: 72133 - protein, 70 aa, Zea Mays
MNPLNPPPVGIYQVVATQMMVIQQMENMVTELQNQIRQEREEVRRDRLEIRREIRQAQLERQQQQRPLPP

SEQ ID NO: 72134 - protein, 418 aa, Zea Mays
MRSLTVASRHPGAAFSTRRRPLLHPAAAGRDSTFQRCWRWEKTQDSSFGSSLRTSRLPRTVHGDILKNLLAPTAGAVSVEQAEAIADLPKGEMWSVHKFGGTCMGTSERIHNVADIVLRDPSERKLVVVSAMSKVTDMMYNLVNKAQSRDDSYIAVLDEVFDKHMTTAKDLLAGEDLARFLSQLHADISNLKAMLRAIYIAGHATESFSDFVVGHGELWSAQMLSYAIQKSGTPCSWMDTREVLVVNPSGANQVDPDYLESEKRLEKWFSRCPAETIIATGFIASTPENIPTTLKRDGSDFSAAIIGSLVKARQVTIWTDVDGVFSADPRKVSEAVILSTLSYQEAWEMSYFGANVLHPRTIIPVMKYNIPIVIRNIFNTSAPGTMICQQPANENGDLEACVKAFATIDKLALVNVEG

SEQ ID NO: 72135 - protein, 54 aa, Zea Mays
MTKLTAFEARTLPLSFGLAWLSLATFKRRLESFDNEGHLFIIKSGCLYLCHPAR

SEQ ID NO: 72136 - protein, 160 aa, Zea Mays
MGLSFGKLFSRLFAKKEMRILMVGLDAAGFNVETVEYKNISFTVWDVGGQDKIRPLWRHYFQNTQGLIFVVDSNDRERVVEARDELHRMLNEDELRDAVLLVFANKQDLPNAMNAAEITDKLGLHSLRQRHWYIQSTCATSGEGLYEGLDWLSNNIANKS

SEQ ID NO: 72137 - protein, 180 aa, Zea Mays
MPISLESVHPVLCCAISYFVEAMESFTNGNVRLLKHERSIVAEDDLDQRWQEATGESVSEVIFLSKHTAVSKRPALTVHPIGVPHLKEDETPPQGGTPGWAAIPSPRIGPWLRLMQKIAVEQGLVPEFEVTLEATHHGPVTSTPTMFVEIGSTEDHWGRQDAAQAIALMVLWLSGSYSMW

SEQ ID NO: 72138 - protein, 50 aa, Zea Mays
MAPVGEKVQLHHKIYLLVPKLKIDYEAKTSIKVPISLTRSVASLALFASS

SEQ ID NO: 72139 - protein, 130 aa, Zea Mays
MEVTNSYVTDPEAQQMVQRLAVHSPDEAGFSLHQGIIRRHQQIWVGNNSPLRTKIVSVFHESALGGHSGINATYQRVNKMFWWQGLKLDVDSFVKQCQVRQQAKGERQFPAGLLQPLPVPTGAWRDLTMD

SEQ ID NO: 72140 - protein, 107 aa, Zea Mays
MKVVQSYSASFVFGTFLRPEGVAKNEALRKECDIKYKQKKSFVFKYKKLILVPLNYYMLSCQPIHLLIAPKARFLVSGIRSFCSSPGRQKSPCCLGDNTRNLLLRCR

SEQ ID NO: 72141 - protein, 75 aa, Zea Mays
MICFTEVRLLQTYSPLRWSQRPGLFQPFPSLKRSLRPSELLFSIKRDTKSLQGPPHNWCLLSWLQLSWNQERRKK

SEQ ID NO: 72142 - protein, 147 aa, Zea Mays
MDNNSIHVFHFRQMWDTSMEGLLSLTKKTTPSNYYYICEKNGGSLCDKMDELACFAPGMLALGASGYGPEQSEQIMNMAKELAGTCYNFYQTTPTKLVGENYFFHAGQDMSVGTSWNILRSDTVESLMYLWRLTGNTMYQDWGWDIF

SEQ ID NO: 72143 - protein, 125 aa, Zea Mays
MSVSSPAMASPPLAAPGTHRGPCFSTLCRLPSPSCYPPLSASSSPAISTVSAFAVLKHKPRGLGLRCQAAEEAPPPARGKTSLKVMISGAPASGKGTQCRMIVEKKLARKQKNTWTMESLCRTKL

SEQ ID NO: 72144 - protein, 267 aa, Zea Mays
MEWSRPKQQGVTPESRAGHAGVTIGEYWFITGGGNSRKGVSDTLVLNLSTYEWSVLTNLEARAPPGSSLVMHTINGENFLVSFGGYSGRYSNQAYALKASLKPSVPSQQINESDTNGFSPLSVAENSSRKVIFEIEELKDEKPGNRADNSKTLGQVVMVEQNEIENRLNQEHLQSLRLKQELTGLENRNAELTEELHLVQDQLSIEQTRASKFENEISDIQQRLQKMDTLEKEIESLRYELDSTVSEEESSSGNELHRSRGFWRWNG

SEQ ID NO: 72145 - protein, 339 aa, Zea Mays
MKPTHTARPTQCPFCKTANYAVEYRGVKTKEERSIEQFEEQKVIEAQLRMRQKELQDEEAKMKRKQSRCSSSRTVTPTTEVEYRDICSTSFSVPSYQCTEQGNECCSSEPSCSSQANMRPFHSRHNRDDNVDMNLEDMMVMEAIWRSIQQEQGHLVNPVCGSYFPVIEPPSRERQAFVPAAPLEMPHPGGYSCAVAALAEHQAPSMDFSYMSGSSTYPVFDMIRRPCNMSSGSLCGAENSSLDTWSGIAPSCSREVVRDEGECSADHWSEGAEAGTSYAGSDIMADAGAMQPLPFAENFAMGPSHFRPESVEEQMMFSMAVSLAEAHHGRTQAQGLAWL

SEQ ID NO: 72146 - protein, 1053 aa, Zea Mays
MEVELRAFCSKHSAVGYTSSVENSNLASELNPRKSGPDNTTLNSGKIPILRFTRKNKDKFTNCGTSTSSSGNLIRVKTIEQGALANTVRNANTQPIQIWERGTGHPSVGGDHMGSSGDIAVVLRKLIDSGKISVSDIASEVGISSESLEAALVGETTTFSHGLTLKIMKWLQNYVQMHSAQGDVCKGSSEVVQESKSDRLVTTDTVDVKNPLVLDDDKGVGVLVDLLDSSVTEPAQTRSESNSKILNENSATCATGVTILQNGKKNMVKEGYNPECSAKEFANESTQDFSPISNKYVLKDEHGILHYQLYQFFELVALQFILREILNATSGNKEFGTSTEIPNENQGALRGRKINDLTDVELGPCLEKGVSSHDHCFVRGDNGRDRVDSVENSFNARDCDSNCSHGQPFFNFDDSHSYIHPFIQKKISHHWDITFNQNKEALNHYIQESSYPSLEKVPTDSSVEVEGTADTTATGQVLKARSLKILEHSPDDEVEGEMVYLQSRLLDNAVVLKHRYEKLIAMVVQNLSRELDALSKRKWDLIFVNQFLRDVREAKKRGRKEKRHKEAQAVLAAAAAAIASSSRNSTVRKDAKEDAPKSSPKLAAGSSRVGQRTSLPQANDSSKSSNSKISSDKKSGSFLLPISSKENGLYCDVCMRTETLLNRIFVCYRCKAAVHINCYRNLENSIGPWNCELCEDQDISSEAATVSDKSHCNGKKLPFAQCGMCHGTSGAFRKTVDGKWVHAFCAEWLLDTKYVRGQDKPVEGTESLVEGKDTCCVCLHNVGVCLRCSSGDCNITFHPTCARSCGFYMNTKGFGTTPQHKAYCGKHSVQQKEADAQQYGPEELTSMKRMRVELEKLRLLCERIIKREKVKRETVLCDHEILAKTKDTVIFSYLACGASSESATTSVNNRSYSGAAQRSDDVTVDSTISGKKTIRFSLNNRGADRNTADSSRTLLSFKRKLSERGPRAGKQLPQRPTIAAEKLEDEDKKTTDKKITMQQREMFQKELIMTSDQASTQNLRLPKGYAYVPRDSLSKEKLWKQNTQPHNPQEPGG

SEQ ID NO: 72147 - protein, 155 aa, Zea Mays
MAMAVASFVAASHHHGSHLAAGVPFSARVGRSLGRSGVTIYMRAQTKEDDMLRYKLDRIPFLEEKVRKVRENGKIICLDINQLMLSQENRFAFTMEVAEEANVYLEKNRHEYGLKKPILHVLSDRMNEAGFSRPEGYLYPYPIKPGPYFIKEEGN

SEQ ID NO: 72148 - protein, 127 aa, Zea Mays
MKYGMAGNHKLVTLELLVVYVMSRKIGTGLGKMSETGTKGYRFFDPSTEWLHVSRDVLFEEDKSWNWDSENSTEQIPSVPKTCEIQFQYNIPAQVGHLPVISDSGTGSIGHSLSGTGGGHSGGVPAS

SEQ ID NO: 72149 - protein, 422 aa, Zea Mays
MREKYNKKPWILEDETGQYQYQGQMEGSQSATATYYLLMRHGKEFNAYPAGSWFNFSKIAQYKQLTLEEAEEKMNKRKTSATGYERWMMKAAANGPAAFGSDMKKLEATNGGEKESARPKKGKNNEEGNNSDKGEEDEEEEATRKNRLGLTKKGMDDDEEGGKDLDFDLDDEIEKGDDWEHEETFTDDDEAVDIDPEERADLAPEIPAPPEIKQDDEENEEEGGLSKSGKELKKLLGRAAGLNESDADEDEEDEDQEDDSSPVLAPKQKDQVKDEPVDSSPSKPAPSGHARGTPPASKSKQKRKSGVDDAKTSSGAASKKAKVELDAKASGLKEEASSLAKPASKTSAASKSGTSVSPVTEDEIRSVLLAVAPVTTQDLVSRFKSRLRGAEDKNAFAEILKKISKIQKTNGHNYVVLRDDKK

SEQ ID NO: 72150 - protein, 155 aa, Zea Mays
MSIETGPYYFHYIIEGRVCYLTMCDRSYPKKLAFQYLEDLKNEFERVNGNQIETAARPYAFIKFDTFIQKTRKLYLDTRTQRNLAKLNDELYEVHQIMTRNVQEVLGVGEKLDQVSEMSSRLTSDTRIYADKAKDLNRQVSTCLIAQGSWFTFAR

SEQ ID NO: 72151 - protein, 64 aa, Zea Mays
MALRGVWQLQKLVVNYCDWGGSSRGIRAFMEAHLPAFKEKIPHLEVVTELVRGQHPNLKGIYKP

SEQ ID NO: 72152 - protein, 232 aa, Zea Mays
MAGVRLVGVRPSPGRLERWVGSLPDAGSRGGRPTLPIRGVRSYFIRSIPPLGRVERGVRKARTSRPAMGGDLYALDFDGVLCDSCGESSLSAIKAAKVRWPSLFEQVDAAMEEWIVEQMYTLRPVVETGYENLLLVRLLVEIQIHSVRKSSVADGLSIQEILENWSKLKPTLMDEWQEDRESLVDLFGRVRDDWIENDFSGWIGANRFYPGTADALKLSSSEAYIVTTKQIC

SEQ ID NO: 72153 - protein, 227 aa, Zea Mays
MARMQLHHRQIAQSILGRWRGRRCTRSRRRRRHWNVPSAVARGLLDAGQNFEAGEQGGHASSLGKLGFLQSEWKMGPGRLRSPFYRQDATPQETHSPTVTRPSTITFQKPPWDHFERGQRLHHLAASSAPADLVELVPRRAMLGQRQTRYSSLYAFRLLITLTKAASTTCQNKPRVRPGRRPVRPPLLWCHRRRPRMMSTGHPRPHRRGRLMCDSAHSDGPREVRSD

SEQ ID NO: 72154 - protein, 427 aa, Zea Mays
MPSPTSYLLLNPSKPSSFRRLSAPRLSRFHVSCDAPRGGGRREVIPAGASKAKKQIVFFDAAPPVSQEGGGAVKKAGSEKLTQVGSGNAALALLRRATKMTLSVLSNLPLAISEMFAIAALMALGTVIDQGEAPSYYFEKFPEDNPVFGFITWRWILTPGFDHMFSSPVFLGLLALLATSLMACTYTTQLPMVKVARRWSFTHSGERIRKQEFADSLPQASIQDLGVILMGAGYEVFTKGPSLYAFKGLAGRYAPIGVHLAMLFIMAGATLSATGSFKGSVDVPQGLNFVIGDVMKPRGVLSVAPDVFNTEVHVNRFYMEYYDSGEVSQFYSDLSLFNLDGKEVMRKTIKVNDPLRYGGVTIYQTDWGFSALQVKKNGEGPFNLAMAPLKLNGDKKLFGTFLPLEDSDSSNPNVKGMGPSAKLKTAY

SEQ ID NO: 72155 - protein, 262 aa, Zea Mays
MLGLCSQIMMSLVCKRLYQTPRSSRNGATKLKLLSSRMAMKITSVIPALDSTTPIFASSFTMELIKKRLKEFGIFLSSRLKVLRIKKRFQAGPFEVEPIRVTHSIPDCCGLVLRCGDGIIFHTGDWKIDESPVDGKKFDRQALEELSKEGVTLMMSDSTNVLSPGRSISESVVAGSLLRHISEAKGRVITTQFASNIHRIGSIKAAADLTGRKMVFVGMSLRTYLEAAFKDGKAPLDPSTLVTKMTKVLKPFLRSLSRDAAA

SEQ ID NO: 72156 - protein, 97 aa, Zea Mays
MLLLGVRFFLKLSFDIIRYRDILFAVIISSYFKLFLFTMMVWEFPSSVIFIVEMFVLSSNVVALRVVSQFPRAHCFAVCLLAHAAKYLTQRWILGTP

SEQ ID NO: 72157 - protein, 79 aa, Zea Mays
MLNQPFFPCYDEDIGCKSEMGSLNQNKDVILTMVSTMQYSRRPAPTNCWRGCFHVFNAGEKLNLVEFKAYFPSSVIQSY

SEQ ID NO: 72158 - protein, 87 aa, Zea Mays
MWASLHPQAAHLAAAWDLRHEERGVRVGSQAGYGYEQAEILPVMDLRSRRTLIVSSCDGFARFVRLFLFRRRGSKVAVTHPIQEVDG

SEQ ID NO: 72159 - protein, 182 aa, Zea Mays
MLGESRKYGTTIVPGLYAPVHLHFFVARMDMAVDCKLNEVHNQVVEVNVKVESAGTHNMHNNDFYAKEKLLKSMRDCDPSSLRHWILWQRKFQAPLQHYTALMDLQDYSENGTVTVVYRVILKGTDGEAYRDATGTTQFHEGRREDAVAAAEEAAFSKACAWFGFGLYLYHQDESHYDDHFH

SEQ ID NO: 72160 - protein, 416 aa, Zea Mays
MNRAHSSSSKLINEKLVEHRISTAKHCPHCGEKIDSKPDWVGLPAGVKFDPTDQELIEHLEAKVKDEGSRSHPLIDEFIPTIDGEDGICYTHPEKLPGVTRDGLSKHFFHRPSKAYTTGTRKRRKIQTECDVHKGETRWHKTGKTRPVMVNGRQKGCKKILVLYTNFGKHRKPEKTNWVMHQYHLGDLEEEKEGELVVCKIFYQTQPRQCSWSSDRGAAATALAATAAAAAAQEQHRRDSGSGSCSSRDHEVSATSFPAGYTVTTAVEMQQHMKQPADHFSFAPFRKTFDQEVGIGGDQVPSNQLGRSEPHHAGLGQQPHGPVLATKTAVPATAFLISRPSNPVSTIVPPAMQHASVVLDHDQFHVPAILLHHHDKFQICRLGRTDNGLHVVHKHKRRCFHCSPPRDRMALHVLAT

SEQ ID NO: 72161 - protein, 247 aa, Zea Mays
MMDHQLFDDPFGSSISSLEAEIFSAAAQLPPSPPWPDIDLDDDYDIHDLSAPAANAATSSGGGYGSGGSGGHRKLSHNAYERGRRKQLNELYSSLRSLLPDADQTKLSIPTTVSRVLKYIPELQKQVDNLERRKKELTNANCKPGVLKTTKAVTPIVSATCLNDTEIMVQVSLHSDVAATALPLSKCIKVLENEGLHLVSSSTYSSAFENKTFYSLHLQFQAPNPQARGVTGSLSISRIRERPQQTK

SEQ ID NO: 72162 - protein, 391 aa, Zea Mays
MMDEDVINNISVRLKLSLTVWDFTLPVTPSLPAVFGISETVIEDRFCLEHGTEGWYSALDHHFRWLLQYRISPFFCRWGDSMRILAYTCPWPADHPKANEYYSDPRLAAYAVPYAPILSCTDAAKNSLRREVEILKSKPHWSKAYFYLWDEPLNVEQYDMICNISNELRSYAPDVRILTTYYCGPSGSELAPSTFEAFAKVPNVLRPHTQIFCTSEWVLGTREDLVKDIVAELRPDLGEEWWTYVCMGPSDPQPNWHLGMRGTQHRAVMWRVWKEGGTGFLYWGSNCYEKAMIPSAEICFRRGLPPGDGVLFYPGEVFSSSHEPVASTRLERILSGMQDIEYLKLYSSRYGREEGLALIEKTGMYLGPDRYTLDHGPVDVMRGEVYRTCRS

SEQ ID NO: 72163 - protein, 571 aa, Zea Mays
MAIELDDDSCNAMQTADPFREAPLGAPDTIGHRASRPQLLDRAGTGRRPFVAYPASWPASLRLGRGKRRRKREPSGQAGSADRLPPKYPRIPIPKQHPEKATSAEVWGAMVVRRLGGTGRALLTLPNIRRRASNSWAAVCDTFFSTKQVFESHRIVFTVGTSIASVLTAWAGYSLRHVQQLKIERRLESIESSLKDNHKVEHEEIKKIVTSSNISAPGCVATAMTTMVVGYALGWRGGAWYARRAFRREQQKLMMGHMKSSQNRWHWRPFNRLRNSRRRLRVEAIRTQRTEVPVEESAPARDAAAAAPLDGNGAGADGSVVPSSDDSWVVKLEQSFNIFATDSVIMVLKGVYGDRYYARFFALETIARVPYFAFISVLHLYATFGWWRRADYIKVHFAQSWNEFHHLLIMEELGGDSLWFDCFLARFMAFFYYFMTVAMYMLSPRMAYHFSECVERHAYSTYDEFLKLHEEELKRLPAPEAALNYYMNEDLYLFDEFQASRTPGSRRPKIDNLYDVFVNIREDEAEHCKTMKTCQTHGNLRSPHSTPNCLEDDTECVIPENDCEGVVVYKV

SEQ ID NO: 72164 - protein, 295 aa, Zea Mays
MSAAGGRTLGRSSFSRATSKLVASSSGSAGVKIGPNGASFVSSGIPDLDRILGGGFLLGSVVMIMEDTDAPHHLLLLRCFMSQGVVHKQPLLFSGAMKEPVLFLGTLPAPVSSSKEDGRHRAMGPAASSDGRANDEGLRIAWQYKKYFGDDKTSRAEHKDNKQEFSNDFDLRKPLERHLLNGQNIECVSTQDADTLSSLQDCCSAFVSKLPRKDGGSSTAGRIAIQSLCAPQCRYFEKFCQIRSVRDGSTWRIHCCPSKQFQMRTKTWQNSSQDIKIWLVFCMSTRWHNLTVRSL

SEQ ID NO: 72165 - protein, 366 aa, Zea Mays
MIISSVWGSREVILSVNVVSCELSRVSPQDSDYSWNVLAVDKNNILAVSSSLITLPQMYYGIKVSQTESNWEWQGVSTPFPKPSDKISSVLAEHKFSILKIPISNPSDELANGAKLPFEAIFVSHKDSASNPTIVVLHGGPHSVYPSSYSKSLAFLFSQGYNLLVVNYRGSLGFGEEALQSLPGNIGSQDVNDVLTALDLVIKRGLIDPSRVAVVGGSHGGFLTTHLIGQAPDTFVAAAARNPVCNLSLMVGTSDIPDWCFVEIYGKEGKKYFSESPSVDDLCQFHQKSPISHIAKVKTPTLFLLGAQDLRVPVSNGLQYARALKERGIETKTIVFPEDIHGIDKPQSDFESFLNIGVWFKKHMGK

SEQ ID NO: 72166 - protein, 227 aa, Zea Mays
MDRSVLYDQTSRSFARVLILPPPPLPAASGGEDDAAWVRAISAATKSTSAPKTLTLDGTVKSSMGGLPSAALLERFATSLEELSIAGVRLSSLTGLPRLPALRCLSLPDNRLSGSAALAAVAESCGATLRHLDLGNNRFAECPVTKVKGYREEVFALIPSLKYLDGADAEGNERLETDDDEDEEEDDEGEEGAEGEEEGDEDDGEEEDDEDGEGDEEEEGDEEVTGF

SEQ ID NO: 72167 - protein, 168 aa, Zea Mays
MKKVLCSYLGRRLRRPNEEFRPNIVEEIPFSEEVACGGYHTCVVTDSGDLYSWGSNENGCLGLGGTDMVRSPEILKSSLFKLPVSKVSCGWKHTAVVSGDDIYTWGWGGANGTFFEEGHSSGGQLGHGNDVDYFEPMMVPFGTNARAVHVSCGFNHTGAIYECSEDFD

SEQ ID NO: 72168 - protein, 99 aa, Zea Mays
MYCLLDWRFSLWRVYFQVRLVSIQALIWWLKLCFSMALRFEILGRFNRARAARLTLPPLYLSNTTFYACWNSRFRCCIWLILLRKELRFSHLLMGSPCS

SEQ ID NO: 72169 - protein, 329 aa, Zea Mays
MPCRCSPRPCSPEEHMEQRAVLWCMVPSEQKKRPRRSRDGPTSVAAVIQRWAERNKHLEYEESEEAKRPRKAPAKGSKKGCMKGKGGPDNTQCGYRGVRQRTWGKWVAEIREPNRVDRLWLGTFPTAEDAARAYDEAARAMYGDLARTNFPGQDATTSAQAALSSTSAQAAPTAVEALQTGTSCESTTTSNHSDIASTSHKLEASDISSYLKEKCPAGSCGIQDGTPIVADKEVFGPLEPITNLPDGGDGFDIGEMLRMMESDPHNAGGADAGMGQPWYLDELDSSVLESMLQPEPEPEPEPFLMSEEPDMFLAGFESAGFVEGLERLN

SEQ ID NO: 72170 - protein, 80 aa, Zea Mays
MSGISTTVPKPKGSQADHQTEYQRPKVHDQHAPPPRGSDGLSSPALATAGSRKKQRQQEPYNKRPDSGEKAGPKGFGVCL

SEQ ID NO: 72171 - protein, 95 aa, Zea Mays
MLQRCWTARDLQNERTERLRPERARVISPARLCLLPRAVPAQRLLPRRHRSSAPSFWSKNFTQERKMDNDNEILVYVAAAHMMLCMMAMVIRSTN

SEQ ID NO: 72172 - protein, 124 aa, Zea Mays
MWFPALICTPSSMAGWLCFSSCCMRFDSRPSIHPRIGTEPLLPFFLVMLIVIDLYVCLSLHVCRCSKMYPDMAEQVTTTTQALIMGVAPSKGHAEGGFEAAAGAENGGCKCGGNCQCDPCNCGK

SEQ ID NO: 72173 - protein, 54 aa, Zea Mays
MFSYLELVTSCNACLILFGSNYSLVLFLFICIHVHYANHLGTFIDYVMRRTKAE

SEQ ID NO: 72174 - protein, 1178 aa, Zea Mays
MPRAPSAAPPHPPACSPAPSTRSSSTPPGAGTPLSSPPPKSALDLLSSSPAPDDEPETSSPSPVPGLPAPAAEAALTALLLALDPASPKVAEPALECVAGLLSLRLLLGDVDAADPSLISKLFAAVLSCVSLGGSGDEALELSVLRVLVAFARCPGVSVSGECLGQVVKACYNVYLGSPSGGNQLCAKLALAQVLVIVFARVEADAMDVRVRTVSAADMMDLSDRSLNDSSVVQAAQVFINEAMEGSDVPEEAPHVDEASVEAEGAGEDGGISKIREDGLALFKNLCKLSMKFGTPDSPDDPMLLRGKVLSLELVRMVIDNAGLFWKTNEKYLEAVKQYLCLSLLKNSALSAMSVFQLLCSIFMSLISRFRSGLKEEIGMFFPMLILRVLENVLQPSFLQKMTVLNFLEKMSKEPQVIIDIFVNFDCDVDAPNIFERIVNGLLKTALGVPTGSTTTLTVAQDQTFRLESVKCLAIVVKSMSAWMDQQLRIGEFSPGNSETLSSADNHNIHNGEEWSGIDYELQFDTSSSDITDSSSLEQRRAYKMELQKGITLFNKKPSKGIDFLIRSKKIGNSPEGVASFLRSTAGLNATMIGDYLGERDDFPLKVMHAYVDALNFEGMDFGQAIRFFLQGFRLPGEAQKIDRIMEKFAQGYCKCNPNAFISADTAYVLAYSVILLNTDAHNPMVKNKMSKADFMRNNRGIDDGKDLPEDYLSALYDQIVNNEIKMSADSSVAQTKQSNSVGRLLGLDNIINFVNWRPAEDKAVGANDLLIKHIQEKIKAKRGKSESTFYVVADATILRFMMESCWAPMMAAFSVLLDQCDDKAATSQCLKGLRFSVHITSVMCMQTQRDAFLTSIAKFTSLHSAAEMKQKSIDSMKAIISIAIEDGNYLQEAWEHVLTCLSRFEHLHLLGEGVPTDASFLTVPLIESEEKTKKSTSVLSSKKTSALQNPAVMAAVRGGTYDSTVAKGSVSALVTPEQINNFLSSINLLDQIGIVELNHIFAHSQRLNSDAIVAFVKALCKVSMTELQSPTDPRIFCLTKIVEIAHYNMNRIRLVWSRIWKVLSDFFVSVGLLENLSVAIFVMDSLRQLAMKFLEREELANYNFQNEFLRPFVIVMQRSNAPEVRELIVRCVSQMVLSRVNNIKSGWKGVFMLMIQEVLSYWHLRRWKKLFEIIFIT

SEQ ID NO: 72175 - protein, 122 aa, Zea Mays
MLAFEDNGSSKIGVRFDKQIPDGCYISTAESLRPDFSAGEEVERLAMTELIEDEALLTDWKQQLDRGVETLKAKSNIGSIRTREVGTTMVVVAAQTKAIAGNFYLLYYLSILYRLDICYFAF

SEQ ID NO: 72176 - protein, 125 aa, Zea Mays
MSDLGLLTYYLGMEVRQDVNEITICQKAYASKIVEKCNMANCNPTDTPMEQRMKLSTAVKGTEVDVTRYRSIIGSLRYLVNSRPDLEFAVGLVSRFMEAPGKEHWIAVKKIIRYVAEHAHCRHKG

SEQ ID NO: 72177 - protein, 257 aa, Zea Mays
MPPPLLQARDYMGAGATPLSCSSSGEGTGPHLALRLGLPGSDSPGRDAGPEPDHAHVDAALTLGPAPAPAPAPPRVGAKRGFADSRDRCAKRDATAADDAAGGVTGEEKRVGAAAAGAPPAAKAQVVGWPPVRSYRKNTLAMSATKTNGEDEGRSEAGCCYVKVSMDGAPYLRKVDLKTFSSYEDLSLALEKMFTCFITGQSGSCKTSRRERLTDGSRADALQDQEYVLTYEDKDADWMLVGDLPWDGNRYDFGAAV

SEQ ID NO: 72178 - protein, 137 aa, Zea Mays
MRSATRRARRTIPRPRRAQSCSPRHASPRPRTAAPPLPPSTHRRHRSAPPVRSASDQAPPPLPRPRPRLQLGPSAAAAQPLRAPLHPRALMLPAECRCPRGASKYSSCLRTCQLCRRRTWRGRRTSCSGTQTPRLWS

SEQ ID NO: 72179 - protein, 355 aa, Zea Mays
MASSTGSLEHGGFTFTPPPFITSFTELLSGAAADMVGAAGADHQERSPRGLFHRGATRGGGVGVPKFKSAQPPSLPISPPPMSPSSYFSIPPGLSPAELLDSPVLLHSSSNFFASPTTGAIPAQRFDWKHAADLIASQSQQDDSRAAVGSAFNDFSFHAPTMPAQTTSFPSFKQQQQVEAATKSAVPSSNKASGGGGGTKLEDGYNWRKYGQKQVKGSENPRSYYKCTYHSCSMKKKVERSLADGRVTQIVYKGAHNHPKPLSTRRNSSGGVAAAEEQAANNSSLSGCGGPEHSGGATAENSSVTFGDDEAENGSQRSGGDEPDAKRWRRTVRTKAAQAPAAASRCASRGWWYRR

SEQ ID NO: 72180 - protein, 347 aa, Zea Mays
MMFLDRQKQSKNPKYILVHCTHGHNRTGFMIIHYLMRTHVSCVAEAISIFAQRRPPGIYKRDYIEALYSFYHEVPDNMMIACPPTPEWKRPDDLDLNGEAKQDDDDDNGDPGPLHNESEDKVITNDDVLGDEVPYDQQEALRVLCYRLLEMPLGRGHAHFPGSHPVSLNSENLQLLRQRYYYATWKADGTRYMMLIMRHGCFLIDRNFSFRRVQMRFPHRSLQGLQDMTLIDGEMIIDTVPDSGLKRRYLAYDLMALGSVSKTRLPFSERWKMLEDEIIQPRNNEKGLERGAKSNPLYKYDMELFSVRRKAFWVLLTVKKVLKVFIPSLCHDADGLIFQLEHFVVDV

SEQ ID NO: 72181 - protein, 85 aa, Zea Mays
MTSSMPNVCTIKTCATPSGTAETLSTPSGMADPSNLCHLPHHKEDPENLDNLNSRKGRRRSIPMRRRRSQHHLRRTWVARKQEAA

SEQ ID NO: 72182 - protein, 102 aa, Zea Mays
MSHYKFKHSRHGSLSFLPRKRSSHHRDKGSRPLGRARRLLPLPRAGPGRAEPRVQRLRGPGARRPRGARRHPPGARPRGEPALRRAPPGAVRQPHQPFELLL

SEQ ID NO: 72183 - protein, 414 aa, Zea Mays
MPRWTENSASTKSAELVKQQDRLEFDDPDEVDEEEEVEYEEVEEEVEYEETEDEYGQTEAVRQVDAKHDSKMVDADTDEGGKGSHDELLALPPHGSEVYVGGIASDVSSDDLKKLCESVGEVVEVRMPGKSGRLYAFVNFRTKELASKAIQKLNNKDLKGKKIRVSSSQAKNRLFIGNIPYNWTENEFKKAAEEVGPGVLKVNLVKAPHSDTNKGYGFIEYYNQACAEYAKKMMSTPEFKLDKNAPNVSWADTKNGGESASTAQVKSLYVKNLPKAVTQEQLKKLFEHLGEVTKVVIPPAKAGHENRYGFVHFKERSMAMKALEDTERFELDGQLLDCSLAKPLADKKDDTSAPKGGPLLPSYTPVGYGLMGAYNPLGNGLAVAGAYNPYGNGLAGAYGVLGAHAAQLEPAVRA

SEQ ID NO: 72184 - protein, 335 aa, Zea Mays
MLFSRRPLAAAFHLAPLSPPLLLFFASASSSCSPAASAAAASVSGSRGCTAARMDSGAVETASTGAVWSSPSAEPRSISVGKEVFCNRSLNMRNITAVGFDMDYTLAQYKPETFESLAYYGTIEKLVKDLRYPEELLTWEFDWKYMVRGLVLDKKRGNILKMDRHKYVKVAYHGFKELSKEEKVAAYGSTLIRDSFDEPDYALIDTLFSLGEAYLFAQLVDFIDKNPGKVPAGTDYPLMYRDVRSAVDLCHRDGTLKRMVAKDPARYINEDLAIVPMLEMIRKSGRSTFLVTNSLWDYTDVVMNYLCGPYTSGVGSGLNHKWLQYFDIVITGRIV

SEQ ID NO: 72185 - protein, 55 aa, Zea Mays
MCISYQVLDQRLQSRVIVVPYVIKKSQEMGEDEASSVIFAKCSTKSSNKSSISWV

SEQ ID NO: 72186 - protein, 463 aa, Zea Mays
MPPPRPTHPPLPSPLPPGPPPLSARRLPLPPNRPAPTSLLLAPPSSPARALALLFPDSSAHLFPSLPSVSPFATSYPAHTPVPSPLAAAASFALLLPSSHLIFLSAHPSPSNSSVHLRAYSLAPAPAFPRFAPASLSFKRHASAAGLPLQDLPFGIGVRLAGGVNAVSLLSLSTGQIWVLSPKLAADGRTVELHKCAVVELEPARPVYAMEVAMGRLLLGEVGGLRVFPLRGLMKGGKERDVKKEVAVVVGRKGCHKKNGMLNGLVVPVNRVSYGGNGEGDFVSTCKLTTLRVKQSSGSYCSFSLAFQNDDQKSEGSMELLNSVKAISIHPLSNNKFLVLDSSGVLHVFIFSTTQMVSRGAIKQCSENIHTYRLHYPMKVQLSAVFSVTSINGGHTVHVMSAVETESPNGDNGDVTGERELAPIKLSAIEAIFTSERVEDIVSISKDSVLILGQGNMFLYGTS

SEQ ID NO: 72187 - protein, 115 aa, Zea Mays
MEAESTAHRPLCPATPERAKESTGTNRHLRRHGRLSGSRTHARCSCRRRYRSRLHPSPPTAPPNGYAANLTATPASVIQTEALLTNDILLSDGIQSPSSVSAKLEDRTNHKNIEA

SEQ ID NO: 72188 - protein, 58 aa, Zea Mays
MIALVMPRTPHVCFSSMCDQVEPCPVIDKMDWLRRQYLPIPSLVILRVYHFLGLGFSS

SEQ ID NO: 72189 - protein, 190 aa, Zea Mays
MFDGGYREKDARDIEIPNIRWEVFELMMRFIYTGSVQINSEISQDLLRAADQYLLEGLKRLCEYTIAKDVNLDNVSDMYDLSEAFHAVSLRHTCILYILEHFNKICTRAGDPQFSNQGTEFIKKSKSKRQELADLMSPNSLAPTPSSDQSCWRSCTVKFLALSVQWYLFWVHGGAVLEINISNVTKFSKI

SEQ ID NO: 72190 - protein, 483 aa, Zea Mays
MKVANGLSLRKSNGRFKSKLMMELVKQWREHQANMRCMNLSKRNNNIYVGAEGANITSPNDSNIWPTSALVAKNSNPRYVLASKCASQPPTMWLENSLNTSSGFKCSKLSIVRNALPSKTPKASVSWKSKDDSNAIPRHLEQSHCKKTSRATRTHFKAMPNLIHKAKNVDTSNLNDGTSGSSWRGQSDSYKGEDINIGKECTKTSELLKSREASRKSNILVVDRKDPNKDEPDKVKGIQDEVMTKEEGVKGHTCEGRATCWSCLKQANTTKTNDAPNLGSLLVGNEHMQGLMSNLRDNSSHLFEKNHSRHQRDDPCEYRETNLKFPNRIQSVGGNGKTNDVTSRRKRLLLEEKASAHVQNDLTYGPMKRRRYIEANEDEEEQNDLTYGPMKRRRYIEANEDEEEQNDLTYGPMKRRRYIEANEDEEDYVGDHHPVHIEDATTELTPQDSISKHCVERQCYCCSKPIDIPRWRYSRCEVFFFTI

SEQ ID NO: 72191 - protein, 1277 aa, Zea Mays
MDATASRAGGGDLNGKENEEDKKGAAPAKKVSLLGMFRYADRLDLLLIAVGTVGALTNGVADPLMTVLFGNAIDSFGDSTSQDIVRSVRKVVMNFVYLGIGTAVVSFLQVSCWTTAGERQSARIRSLYLNAVLRQDIAYFDTELTTGQAVSRMSSDTLVIQDALGEKAGKLIQLSSTFFSGFIIAFTRGWLLTLVMLTSLPLIAVAGIVSSHFLTNISSKKLASYGDAGDTVEQTIGAIRTVVSFNGENKAIAAYKSLIKKAYRTDVLEGLINGFGMGSVFCILFSSYGLAFWYGGKLVVDKGYTGGKIITVLFAVLTGAMSLGGATPSVSSIAQGQSAAYRLFETIGRKPEIDSGDTSGVVLEDIKGDVELKDVRFRYPARPEQLILDGLTLRVGSGTTMAMVGESGSGKSTVISLVERFYDPHGGEVLIDGVNIKNLRLSWIREKISLVSQEPLLFMTSIKDNIMYGKGDATVEEVRRAAELANAANFIDKLPDGYDTMVGQRGTQLSGGQKQRIAIARAILKDPKILLLDEATSALDVESERVVQEALNRIMVERTTLVVAHRLSTVRNVDCITVLRQGKIVEQGPHDVLVKDPNGAYSQLIRLQETRADERRKTADSGSGVPDHSRSKSTSLSQSLARRSLLNKDSFGSSSSNRYSFKNPLGLAVDLHEDRSTIGGEKTEELSDVVVVPKKAPIGRLLKLSVPEAPVLLLGSVAASVHGVVFPLFGLLMSGIIKSFFEPPDKLREDSSFWALIAVALGVTCLVVVPAQYFLFAVAGGKLIERIRALSFQSIVRQEISWFDNASNSSGALGTRLSVDALNVRRLAGDNLALIMQSIATLVTGFAIAFAADWRLALIITCVIPLVGAQGYAQVKFLKGFSEDAKEMYEDASQVATDAVGSIRTVASFCAEKRVVAAYSDKCEALRKQGIRSGVVGGLGYGFSFLMLFFTYGLCFYVGAQFVRQGKTTFPDVFKVFFALVLAAIGVSQASALASDATKARDSAISIFSVLDRESKIDSSSGDGMTLEVVSGNIDFSNVSFKYPLRPDVQIFSDFTLRIPSGKTVALVGESGSGKSTIIALLERFYDPDSGRISLDGVEIKSLRVSWLRDQMGLVGQEPVLFNDTIRANITYGKHGGATEEEVVAVAKAANAHEFISGLPQGYDTMVGEKGIQLSGGQKQRVAIARAIVKDPRILLLDEATSALDAESERVVQDALDRVMVSRTTLVVAHRLSTIKGADVIAVLREGKIVERGRHEALMRISGGAYASLVELRSKTE

SEQ ID NO: 72192 - protein, 160 aa, Zea Mays
MFSCTWTGPCPSLYVPRPPRHPLLVWVLVAGIFGDKPRLPPFVVVAGDLIVSSRSSSLPAAISACPSRRCRSIHVLCHWMLVELGTCFLLRHRNSSPLASRRRAVIAYHVGTPPLVLRRSSGAPSSTTLVQGRRVRVSDSRNLSEKVEPAGRLSGARQEA

SEQ ID NO: 72193 - protein, 75 aa, Zea Mays
MKPASRSTPIDLEVQQPLFAAPSKLARHFSRPLTKEQMEAIMELATQGKEKEGIKKKGSKVTPLMAPIIEAAEML

SEQ ID NO: 72194 - protein, 241 aa, Zea Mays
MSAQAGPGTYSPAAAAGDRRRERKEELRRHLAEDADWPRADGRSFHDCRPAFMQTGPTTAASGSAYAEFGKTKVIVSVFGPRESKKAMMYSDVGRLNCNVSYTTFATPVRGQGADNKEYSSMLHKALEGAVMLHTFPKTTVDVFALVLESGGSDLPIIISCASLALADAGIMMYDLVTSVSVKEHHHRSNLRRGSMARRKPCGGFHASPQGDHAAHAHWRVERWQNNQCSRALYGCLQQAG

SEQ ID NO: 72195 - protein, 119 aa, Zea Mays
MEELDNQRRRLQESADEVTRLTQLISAKDATIKGLRASKKSIAQELEAAQLAARVAEETAVTLKAQRDKAMDKAIRAGRILMRRPGVVVPEDIRADVNAAPDSSNHPSSSVVPEKDIGK

SEQ ID NO: 72196 - protein, 348 aa, Zea Mays
MTSDAIKLWEGEKTSTYFAVFSFSQIRNGTDKFSTENMLGEGGFGPVYKGHLPDGQEIAVKRLAANSGQGLTEFKNEVLLIAKLQHSNLVRLLGCCIEEEEMLLVYEYMPNKSLDFFLFEKSRRALLDWEMRMNIIEGVAQGLIYLHKHSRLRVIHRDLKASNILLDTDMNPKISDFGMARIFDPKGTQANTKRVVGTYGYMAPEYAMAGNFSTKSDVFSYGVLLLEIISGMRNAGPRRHGNSVSLLGYAWELWNEGRCHELIDKPLRGRCPENVALRCIHVSLLCVQEQAADRPSMTEVISMITNGSATLPDPKQPGFLSMLVPNETDVAEETCSLNGLSVTILDGR

SEQ ID NO: 72197 - protein, 267 aa, Zea Mays
MGPLGPGLVLADLGIGDWFGGLLFSAGQQANEAVQDQLSALSFSSLAVIFGAGLVTSLSPCTLSVLPLTLGYIGAFGSGKGRSEVVGNSIAFSLGLATTLAILGVAASFAGKAYGQVGQGLPVAASGLAIIMGLNLLEVLELQLPSFFSDFDPRAAAANLPSGVQAYLAGLTFALAASPCSTPVLATLLGYVATSRDPIIGGSLLLTYTTGYVAPLLIAASFAGALQSLLSFRRYSAWINPISGAFLLGGGVYTLLDRVFPATSMVM

SEQ ID NO: 72198 - protein, 342 aa, Zea Mays
MSMEGGASGSAAVTDSAMAEASAVDPDLALAHDSYAFLINWLERFPQYKHRDFYITGESYGGHYVPQLSWLVYQNNKGIKNPTLNFKGFMVGNAVIDDYHDYMGTFEYWWTHGLISDETYAKLWEDCKNDVSENPSEECQKIYEVAEAEQGNIDLYSIYTPTCKKTSLQKRRLIRGRMPWLPRGYDPCTELYITKYCNLPEVQDAFHANVTGIPYAWVGCSDPIYEYWKDSPRSMLPIYRELISAGLRIWVFSGDTDSVVPLTATRYSIDALSLPTITKWYPWYYDEEVGGWCQVYEGLTLVTVRGAGHEVPLHRPPQGLKLFEHFLRGEPMPKPVESVQSF

SEQ ID NO: 72199 - protein, 928 aa, Zea Mays
MGQNMLQPQVLCLCSIILTLFFTLLQPTAAQITAPWEVDALKAIRGSLIDPHGNLSSWNRGDPCMGNWSHVICYNATGSDGYFHVKELDFMWNSIGGTIPKEVGNITSLELMLLNGNQLNGSLPEEIGFLPNLNRIQIDQNHISGLIPKSFANLNKTKHFHMNNNSLSGQIPPELSRLPSLVHLLLDNNNLSGYIPPELSKLPNVLIIQLDNNNFSGSTIPSSYGNISTLLKLSLRNCSLEGPVPDVSGIPQLGYLDVSWNQLRGPIPSIQFSSNITTIDLSHNNLNGSIPGIFSGLPYLQRLSLDDNNLTGSVPSNIWQDIDLRGNKSLVLDFQNNALNNLSTPLSPPPNVTILLHGNPVCIGQNQLNISQYCQSGTYVARGGSADNSTVCPPCSSDFPFERIPMSPIPCSCVVPVYVGYRLKSPGFSNFIPYESQFQQYLTSGLSLSSYQLEVSTFMWEEGPRLKMDLKIFPNNTPFFTVSEVFRLNGMFTAWQIADSDIFGPYELISFNQGWYNTIIPQGTKSGLSTGAIVGVVMAAFVAAAILSSLVTIIILRRRSRQSSSNKRTAKRISMKIAGVKDFTFDELSHCTHDFNDSTLIGQGGYGKVYRGVLADGIVVAIKRAQQGSLQGSKEFFTEIELLSRLHHRNLVSLLGYCDEDDEQMLVYEYMPNGNLRDHLSARAKVPLDFPMRLRIALGSSRGILYLHTEADPPIYHRDIKASNILLDSKFVAKVADFGLSRLAPLPETEGSAPGHVSTVVKGTPGYLDPEYFLTHKLTDKSDVYSLGVVFLELLTGMQPISHGRNIVREVLAANQSGMIFSVVDNRMGSYPAECVEKFAALALRCCQDETDSRPSMVEVVRELDMIWRMTPGTENIASSESGVMGMGSNSTSTPTASGSRMDDHYISSMEVSGSNLLSGVMPSINPR

SEQ ID NO: 72200 - protein, 459 aa, Zea Mays
MSRHCVTLLVIIFGLLQMAVALYSNPSSTHPNCTERCGNVSIQYPFGFGSGCFRQPDFSLTCDGGGGGNQPPKTFLHDGITEVLPDSGVTVGLSRLIDVAISHTIFMAPGIPSYNFSWNLSSFTMLDGSFNVTGCDFDIYRQEPGKNGSIPRCTNSCPQNITETVARQNCNGTGCCRLYVGEVVPDFQLKFVLHNNDTRGDHDALSNGSTLWNTINITSNWAQILWDIDDQPTCSRAKDKNINYACVSNYSHCFDAELFDIGYRCGCNSGYVGNPYVVDGCKRDEGYSPNQLKENCSRSCGNISVPYPFGLEEGCSARKLFKLNCRNATASMLQFDDDRVVAFINVAESLVGIRFTSHFEDDQLGIYVPGEPDLFMGLGESVVSMHWAAANLTCDEALKNKSQYACVSSNSKCLGVNSKDGYIGYRCKCLDGFQGNPYTISDGCEVVRLFVSRARPFVL

SEQ ID NO: 72201 - protein, 382 aa, Zea Mays
MSPVMANQFSIFVTRGGTKKYASVLSPGQLDGLKKSTDDGISSWDWKLKGDRSTYHALFPRAWTVYDGEPDPELKVSCRQISPFIPHDYQESSLPTSVFVYTLVNTGKERAKVSLLMTWANSIGGLSHHSGDHVNEPFVGKNGVSGVLLHHKTANNNPPVTFAIAACENQNVNVTVLPVFGLSGESSVTARGMWGTMVQDGSFDQDNLNTGPSMPSLLGDTVCAAVSASTWVEPHGRCAVVFALAWSSPQVKFKKGSTYYRRYTKFYGTSPRSAVNLVEDALMKYKHWEEEIDKWQTPVLQDERLPEWYKITLFNELYFLVAGGTVWIDSGSLVSDADNKSNPEESNLSHEIDDKENVGKFLYLEGIEYFMWCTYDSCFAGR

SEQ ID NO: 72202 - protein, 1325 aa, Zea Mays
MAHVSFKSKDVDSGMSRWSEYLSVEEPIPSAMATWRNMSADAPQGSSAGSHKHLQMEPVVQLSKVAEGLLAKMYRLNSILDYPDPNTHTFSDAFWKAGVFPNFPKICITMSKKFPEHPNKLQLERVDKFGLDALNENAEGYMHNLEQWILLLLDLLAFREQALRLILDLSSTVITLLPHQNSLILHAFMDLFCSFVRVNLFSDKMPRKMILQVYNILHIMLKGGRDCEFYHRLVQFVDSYDPPIKGLHEDLNFVSPRIGEVLEAVGPIIFLSTDTKKLRNEGFLSPFHPRYPDILTNSAHPMVVLKENLILPLFRDEYILLHENYQLYVLPKVLESKRMAKSGRTKQKEADLEYNVAKQVERMLTEVHEQALVSCDAMHRERRILLKQEIGRMVLFFTDQPSLLAPNIQMVFSALALSQCEVIWYFQHVGIASSKSTRLKTVDIDATDPTIGFLLDGIGKLCCLVRKYIAAIKGYALSYLLSSAGRIRFLLGTPGMVALDLDATLKGLFQQVLHCLENIPKPQGESVPDITADLADLRKHWLSILMIVTSSRSSINIKHLEKATVSTGKEGLVSEGNAAYNWSRCVDELESQLSKHGSLKKLYFYHQHLTTVFRNTMFGPEGRPQHCCAWLGAACSFPECASAIIPEEVNKIGRDSISYVESLIESIMGGLEGLINILDSEGGFGSLEMQLSPEQAALRLNNTRAKGVSSLLTPGYESYPDNSSSIKMLEAAMQRLTSLCSVLNDMEPIGVLNHVFVLREYMRDCIIGNFRRRFHSMIRTENCIQRPSIIESLLRRHLGIIHLAEQHISMDLTEGIREVLLAESYTGPFPNLQMFETPVGTQGGGSAVEMICNWYIENVVKDASRIGVAFDAIQNCFRSSQPIGGGCLAESFTDKREMKSLVRLFGGYGIDKMDKMLREHTSALLNCIDSALRSNRDALEGLAGTVNSGDRIERDVNLKQIIDLETLADLCIQAGQAITFRRLLVEAVGAVLEEKVPLIYSLLKGLALQLPDEVPDKNEIIRLRKVASSVGVGDKHDAEWVHSILADAGAANDNSWILLPYLCAAFMVSNIWNGAVYDVNIGGLSNNLHCLARCVSAVIGGSEYTRVEREQRINSLSNVHTDELQEAELPSRVSAEANIKSCMQIYVKLSAGIVLDSWNDTSRQHIVPKLTFLDQLCELSPYVPRSTLEAHIPYTILRSIYHQLYGGSLLASEPAEQSPRQSPLISLAHASPSARQMQNRPETTPRSHTFDPGYYSSSGSQHDDGYDADRRTGRLLRSLRRSGPLDFGASRKAKKFVEGSSSGSSHGAGSLQRFAVSRSGPLSYR

SEQ ID NO: 72203 - protein, 425 aa, Zea Mays
MPSTTNVFLKFRDDKGDIVTNDARCLLRMYEAAHVRVNGEEILDNILIHTKRQLQCIVDDLEPTLQEEVRYALETPLFRRLNRVQARQFISTYEKSTTRINMLLEFSKLDFNILLTLYCEELKDLTLWWKEFQAQANTTIYARDRMVEMHFWMMGVFFEPQYSYSRKMLTQLFMIVSVLDDLYDSHCTTEEGNAFTAALQRWDEEGVEQCPTYLRTLYTNIRATIKAIEEDLNFQNNKHAKLVKGLIIDMAMCYNAETEWRDKKYVPATVDEHLKISARSSGCMHLVSQGFISMGDVATSEALEWASTYPKIVRAVCIIARLANDIMSYKREASNNTMVSTVQTCAKEYGTTTVEQAIEKIRELIEEAWMDITHECLRQPQPKALLERAVNLARTMDFLYKDADGYTDSRSIKGILDSLYVHLID

SEQ ID NO: 72204 - protein, 56 aa, Zea Mays
MGSPVAVFENENQWETAEIRGWFSPGDFVLILKNFLLLLERMRFAKIQNVFQNNPA

SEQ ID NO: 72205 - protein, 695 aa, Zea Mays
MYLAYGWPQSIPLDPDDSDRVVLLRVLGRLLLAVCPASLHLWSAAQHRVRLARSDRSPESLATHGHNAHAAWSPDARTVAVLTSSFYLYVYKVQHSGKQLIVGGKQVPGLCLASISLIITEKVPLANGVAITSNFVCDSKSMLLGLSNGHVQVVSWNAEFSDSFKLGCYVCSSEKPTAAVDALVFDPPSLRESSNARPAPCCTGNSSIVHVELSVKLRLLVALYSGCRIALCTIGKKGLRQPGSTRVERWLDTDDAMCTSVASEQQILAVGCSRGVVELYDLAENTRHIRTISLYDWGYSVEDTGPVACISWTPDNCALAVGWKFRGLTVWSVSGCRLMCTIRQTGSNSASSPMVKPSALKFEPLMGGTSHIQWDDNGYKLFAVEESLSERVLAFSFAKCCPNRGLSGTTYSHQVLYGEDRILLVQPDDADELKILHLNVPISYISQNWPVLHVVASNDGMYLAVAGSHGLVLYDLRNKRWRFFGDVTQEQKIQCKGLLWMRKIVIVCNYVESSNTYELLFFPRYHLDYSSLLYRKQLLGRPIVMDVFQDYILVTYSPFDVHIYHVVVSGELSPASNPVLKLSTLRELSIMSPKSPPVSMRFIPEQNDKGALTEDTHGFSDLLSQQPSRCLILRTNGELSVLDMDDGHEHTLTNSIELFWVTCSQFEEKGSLIKEVSWLDYGHRGVVPITWSRSF

SEQ ID NO: 72206 - protein, 98 aa, Zea Mays
MLYYGCSEASNFSVYCNTWVHLVTLRQLIAAWFSCRYTRFKKRYADFHGRAADLVHGLRGTAMPRRQALEEEQCTEEKGISTIPKHKYASKACSPKGA

SEQ ID NO: 72207 - protein, 951 aa, Zea Mays
MCSTAVLLVRTCVVLVCLAALARAPAKVHAASGTGDGLLAIPTNASLSHCPSWCGDVQISYPFGIGPGCFRQGFELTCDQTAPSPRLFFVSRNSSIQVTSLYVGSSVVLASAVGFNVTMSAGVDTYTKSWEAPTATGVSFYADHNFLYTVGCGVYVYVFGDNMTDIIGYCTSICTDNREIMESVGACEGLGCCSILMRGGQGFTLKLGRLNSTIPQFGEALSSVKIIFSEYYEFVTDDVYASWVNTSNVHGIVLDIAITDQPSCASARSQENKDTYACTSESICDDVQGGYSCVCPGQIEGNPYIKDGCIEAPSIRNCTRLCGNISVPFPFGIEEGCYANDNLRLNCTINDTTLILDRGYAQYCVTNLSLDDGLLMVTNMLNATSFNNMERVVITNYDGYYQNGFYSTDEDVVDGNYDFSQEDTTIKWFIANITCQKAMQNNATYACVSDNSICKDVMRGNIRDGYRCKCSDGFQGNPYLQNNCTDINECFIPNKCNGICHNFDGGFNCTSCPHGKEYDPKNQKCVMSAKQRILIFGIVIGLVCGLGSISFALGAIVLTGKWKKGIQRRIRREYFKKNQGLLLEQLISNENATNKTKIFTLDELEEATNKFDATRVLGHGGHGTVYKGILADQRVVAIKKSKIVEQIEIDQFINEVAILSQIIHRNVVKLFGCCLEDEVPLLVYEFISNGTLYDILHENIATKCLFSWDDRIRIATEASGALAYLHSAAAIPIFHRDVKSSNILLDDNFTVKVSDFGASRSLSLDETHVVTIVQGTFGYLDPEYYYTGSLTEKSDVYSFGVILVELLTRKKPIFINESSAKQNLSHYFIEGLQEGALMEIIDSQVVEEADQEEINDISSLIETCLRSKGGHRPSMKEVDMRLQCLRTKRLRNKTHLLIEKGGEMEPLLCVEAQHPHERINPIYNEEHLTIPMMSGCYSLEQELAAASSMVR

SEQ ID NO: 72208 - protein, 371 aa, Zea Mays
MRRRTGAEIRVYSKADKPKYLSFGDELVQVAGPPAIARGALTEIASRLRTRTLRDTSTANNPPPFAPSDDPTVDMPSRKLTLYGGPTNDTPYGRPANDPLYGRPAIDPPFGRPTNDRPYGRPAIVPPFGRPTNDPPYGRPANDPPYERPTNDPPYGRPSSTIAYGRPNRSAPRDPSDAYPVDYFSKREHPSGGPMFTSNAPSAAYERYAAPTHFPTREPPSTFSHRSYRDHMPTDSYSSRGTQKLDITRDGNSDAYDYTEAAGQIHGLEDYRGLPSASGRFSSTIELRIPNSSLESIVGVGGVNLAEIRQISGARLRLHEAHAGSSESVVEIQGTLDQAKAAQSLLEGFISANSRQQQSHSSRMPLYPRWG

SEQ ID NO: 72209 - protein, 64 aa, Zea Mays
MSIGDVCPKESEEPIKAQYQLSSSMQASPPTQDEDQAQDNDDENQEDEPPQEEDNDQGGDEVDQ

SEQ ID NO: 72210 - protein, 202 aa, Zea Mays
MAATATLQRATTSAYYVWISEPTSIEERRRLLLQRLHLPVAFPDSQLASTSCSSDVQRCRRCLVLDNFGKPAIIAPDSINPWWSLLEEAVKSAGNKLGKLEIFPASTNSCYFRQIRLPAFGFSSMTNTPILLHETMTIMWFVSLVLVWPSDAIKFLSKNEYLKGIGIYEPIIYRSNLLILKDIFRTAVTLQIPTDSDKTWHM

SEQ ID NO: 72211 - protein, 83 aa, Zea Mays
MPLSYSLSLLISRRPSWLLLAPSVDRPCSSPSMAVLGLHLKPCPRIVFQHPLHTLASSSPAPSVRPAMATSPRPQPRRHPPVR

SEQ ID NO: 72212 - protein, 55 aa, Zea Mays
MRGLNHRSNAMGSGSATTAVGSTSSARSLSTFLPPKQTSTGRPLHRRPWPEIYWP

SEQ ID NO: 72213 - protein, 128 aa, Zea Mays
MPLPSTTSTYSSTSAALRSHSSTSPPISTPGHPALIGRHRPFLVTHRAAERWLHHMQQALDATESIDVDSKTKMMNFFRHTAYFLVAGNEMTRQQGHGVACKHATMCLYSIPYTMELKQPPHSKKQWY

SEQ ID NO: 72214 - protein, 283 aa, Zea Mays
MDRYQRVEKPRNDTPISQNEIRITTQGRMRNYISYGMSLLERNKHMQAREAQLCMSDTCSLHENGHDEISIKAMGQAINKTVMVVELIKRRVGGLHQNSATESVDITDTWEPLEEGLLPLETTRHVSMITVTLSKKPLDTSSPGYQPPIPAEEVKPAFDYDHEDSYPTGRGRGRGGGRRGRGRGMSNGPSPPAYGYNEEWGEEGDYYNRGRGRGRSRGRGRVRGGYYGGGRRGGYSYGYGARGGYYEEQDEYYDDPEEYAPPGRRGRGRGRRGMPWRGRGVYY

SEQ ID NO: 72215 - protein, 488 aa, Zea Mays
MIALNDHGKAVESLTNSIREMKKKLSNLELVMEELDNVKNLMKAAMVEIEENKKSTAAALKLMENELQKLKGSTKVKPRNMAQCFLLLALIGCVMFHVPCHFLESTVVLLLSVESDVDFGRTHGRRACHFHEDPRAEPRVTFMRYSVGFLIRVAFGYIELCSSNLCWVSGFHVDFWEDPRSEARVTFRSLQRCVLNASVMFHVPCHFLESTVALLLSVESDGRMLILGGPTGEGCVPFMRYSVGFLISVAFLQGVEFQGPMLIFGRTHVLESTMGLLLSVESDGQMLVLGGPTGEGRVTFMRYSVAFLQSVGFQGPMLIFGRTRGFHVDFLEDPWSVVRVTFRSLQCCVLNASVMFHNPCHFLESTVGLLLSVESDGRMLVLGGPTGERRSHVDFWQDPQSEARVTFRSLQCCVLNTSVMFHVPCHFLESTVALLLSVESDLRMLILGGPTGEGRVTFMRYSVGLLLSVVFGTMLLRSFKVLSFRVPC

SEQ ID NO: 72216 - protein, 375 aa, Zea Mays
MIAVLREDNRRVRFLADGTWGIRKVIGAVAHDLGAHDPWHELNAYNIHDTSRWKDLNPKFVLQIYRDFAATGDKSFGKDVWPAVCTAMEYMEQFDHDGDGMIENDGFPDQTYDAWTVQGVSAYCGCLWLAALQAAAALAGSLGHDDYAERCMTRFVKAKTVFEARLWNGSHFNYDSGTSYSSRSIQADQLAGQWYTASSGLPPLFDEDRIKCTLQKIFDYNVMRVKGGRMGAVNGMHPNGKVDETCMQSREIWTGVTYSLAATMLLHGMEHQAFTTAEGIYTAGWSEEGYGYWFQTPEAWTIDGHYRSLIYMRPLAIWAMQWALSPPRSILEAPKVNTMDRAHISPGTFQFLQDSVRKMTPKNGCFGNTVINLDC

SEQ ID NO: 72217 - protein, 64 aa, Zea Mays
MTFTLGKVTSIPLFYLFLLFNPSKQKISHNHRRYHIYITYLTKTINLINQTRSNTNISIQHLRT

SEQ ID NO: 72218 - protein, 298 aa, Zea Mays
MVLLGICHLWMVLLGICLVITAHMKWEVHHLFVRRDICINEIDASVYSVQYTSYGDVKTGKQENINNTYVGRLASIEGVNEQLNLHSYPIPNGGQHDLLPNLDVLSSNTDPEKTLANTDNEVGYSGLFSECFSQPPTGEDGGNIIAPQPCDQDPNGMIPVGDYFPQNSSMEFFSGYEDYNFDDGLLPIGSNDQISFRILGTEKDPFAPVLDVPGRDKEESSTETSGFIESSNNVADMLPDLNLNHFTSTASTHSNHSVSIESLEDSVADARSNKERAAHAVVLMLLLGFDRRRLQVQE

SEQ ID NO: 72219 - protein, 102 aa, Zea Mays
MSKPSLLVQPSSSLSPPQAHISRAPLLPDFSCSSPWPSHPLVVELAKLPLPWCPGLAGSVVSLIVFFPAGRLCERHHASLVLAPSPVSSALPAAALARRPAC

SEQ ID NO: 72220 - protein, 231 aa, Zea Mays
MAIVLLALLLFPSAYAQPWSVCGNTGNYTAASTYQDNLSQLAASLPKKASSNTSPLFATGTAGAVPDLVYALALCRGDINASACKDCVTIGFEDAQQLCAFNKEATVYYDSCLVSFSNEDFLSTTVNGNENEVTVLMDAQNFTESADYIRLLLFTLLNDTSESAINSIRRFTTARMDISSLPTIYCAVQCTPDLTADECAACLQDFPQVTLQYLDGQRGGRLLGVRCNMRN

SEQ ID NO: 72221 - protein, 141 aa, Zea Mays
MEKSTVVVSIPVVVMAETAEIDYSSSFSVFTMEAYDLLGDDVCSAQMYSEAKLASVAATVSRRVEKVERDYLSHDKPRTVLLGEACNNLDGEFCDASYQAGISRELAHTWSLILITIHVFPELSWSHSQIDVHTMYLCVSF

SEQ ID NO: 72222 - protein, 251 aa, Zea Mays
MFQKDIKRVSVENWKSSGKPTGGFHKKNMVGTLIYMAPEILRKDIHTEKSDVYSFAISINELLTGVVPYTDLRAEAQRCWDPDPEKRPSFEDIIDELNIVQKHIVSNASVPSSPVSKTQNGTIEVHHYQEALNWFNQGELFVKGSSRSDLKNLWSDCFDQSSEYHPTLSWGSFATCGRRETMEDTHFVLPHVSEENDVFAFGIFDGHRGSAAAEFSVRAVPGFLKQFGQGASPTDALSEAFVRTDIAFREN

SEQ ID NO: 72223 - protein, 236 aa, Zea Mays
MGTTDLKIPANSSNSGGRTELPPRACCVVVEYLAGGSLKQYLIKNRRRKLAYKVVVQIALDLARGLNYLHSRKIVHRDVKTENMLLDTQRNLKIADFGVARVEAQNPKDMTGATGTLGYMAPEVLEGKPYNRKCDVYSFGICLWEIYCCDMPYPDLSFADVSSAVVHQNLRPDIPRCCPSPMANIMRKCWDANPDKRPDMDDVVRFLEALDTSKGGGMIPEGQAGGCLCFFRARGP

SEQ ID NO: 72224 - protein, 52 aa, Zea Mays
MVRGSNNSSGGSWEDSGCSCLSIALGKTGIPSKTMVPSGSSQSFFSPLIETG

SEQ ID NO: 72225 - protein, 192 aa, Zea Mays
MKCPFVMLLSEKFQGSSPSYANNTAGSRRFNIEKHGDGRSCNKKSEKKRENILDFNTDPLPSYSMDEAAVGIITMEDEEIYDETDEYVDVHNKIRINMLPPGKALSPTISPGGGPLPQGLRKTPMTSPFSPYYHCNSVLRSPASNHCQSPGTLPTILSPGRSPTAQTPGQSSPNGSQVSINSNGQHKKDGEN

SEQ ID NO: 72226 - protein, 65 aa, Zea Mays
MYKDMFGISQVSTSPNPKLHIYQLSKANQLQRLYGHMDSCRHAPSIIFFTGQIIYSLRFFLVVVF

SEQ ID NO: 72227 - protein, 56 aa, Zea Mays
MVDIYALVCRLMVSDYQEVIKPWLSLKSNLSMSVVFFWNMSLSLWYTCVEHKDSRW

SEQ ID NO: 72228 - protein, 302 aa, Zea Mays
MPPGRMDGARTRKDLGEVPITEYEKERALNVMRNNKMLSSLGITGLTSLIRSSSTRKNSIAREDFDPLYEPDHSEDNDHHVAVQAMQDEPFCIERRTTNMSTGFGGTKGSKRVVAPNVEDQVGRVTRQKTKELSLVEKDIHGSTANTDEHTLISANFSAHHDDEIQMCDEGNRRPEVPMQAAMLASEGGIVIRQHMPILTHWKEYKNDKSYLEDFVGRIGGQFAIDTKNKDVKYACADLMRCNQRQMRYKLKKAYFNGVAADKVRTTSPLSTMTDEQWMQLVNMWSTPKHKGIELLVAICVF

SEQ ID NO: 72229 - protein, 266 aa, Zea Mays
MLLASSTRRYEQFPLARNNGLPRFSRVKMSCLGTNQSNHHSDTVRSSSPSCGDTRKIHPVVKMCGITSARDAEMAVKAGAELIGMILWPNSKRSVSLLEAKEISRVAQSYGAESVGVFVDDNEERILRVSDSCDLNFLHGDESRALVHTLSKNNRIIYVLNADDDGKLINIPDIEYELDWYLVDSAKGGSGKGFNWQKFQMPSVKSKNGWLLAGGLHADNVCEAFSALKPDGVDVSSGICGRDGIRKDADRINSFISNVKSLNFLS

SEQ ID NO: 72230 - protein, 140 aa, Zea Mays
MTVLSKILYGSMHVKSYDWIEPTVLASSQPARLAKLHTDDVRTAPCPTSILYPQSGGNLHCFTSVSSCAVLDVLAPPYNDDAGRICTYFHDYPFSSLSAGRTKVAGNPDNYAWLEAINTPVNINMHTGMYTGPTVQELQT

SEQ ID NO: 72231 - protein, 151 aa, Zea Mays
MVLWNHLAYLINYYYNREWGPEAITRTPRPRTSLLAKSVINGEWRFTTQPPDLGASFAVLARLRNCILRASKRRDGTPVATRCCLFIVIILSEVPSRKMTMVVGIDDSEHNFYTLKWAHCSTSSRRPSCNTTALLSSPPSPLSPPLFALPT

SEQ ID NO: 72232 - protein, 689 aa, Zea Mays
MVNVYDTTNERPISMYGSNDTGSGMCQVSTLNFGDPSRKHVMHCRFIQSPPWPWMAITTSIGTLVIALLIGYIVHATAKRIARVEDDFQEMSLLKKRAEDADIAKSQFLATVSHEIRTPMNGVLGMLQMLMDTDLDTTQQDYVRTAQASGKTLVSLINEVLDQAKIESGKLELEVVPFDLRTVCDDILSLFCGKAQEKGLELAVFVSDQVPQTLIGDPGRIRQIITNLVGNSIKFTEKGHIYLTVHVVEEIMHCLEVETGTQYTNTLSGYPVANRKRSWENFRLFSRELNSSEMPFAPIASDSISLMISVEDTGAGIPFDAQSRVFTPFMQVGPSIARIHGGTGIGLSISKCLVGLMKGEIGFSSKPQVGSTFTFTAVLTRVHSSRNENKSSEFKEINALVVDHRPVRAKVTKYHLQRLGVQTELTTDLDQYISKNNCGSQIAKLVLIDKETWLKESHSMPLLVTKLRNKDQPDSTKLFLLENPKSSVKSNSHIFREYNLNVIMKPLRASMLQVSLQRALGGIDKLHCRNGVVGNSTLGSLLHKKRIIVVDDNIVNLKVAAGALKKYGAEVTCADSGKEAITLLKPPHNFDACFMDIQMPEMDGFEATKRIRVMERDLNEQIERGEAPPECVGVRQWRTPILAMTADVIQATHEQCLKSEMDGYVSKPFEGEQLYREVARFFLNQDQVQ

SEQ ID NO: 72233 - protein, 589 aa, Zea Mays
MPELRSSTRQACLRSKKLEDLQLGEPPAKPVSPAPPRAGKRAPTRAARGRKGATGKGVPPAPTTRRKRGNIVDLEADPACEDPPKAVKGLEVAAAAAPKNLPLKEVAEVGVLKMNGVSAEKIIGAEDESTATPVPERVYVGRRVSGGAARTGPDAYEVALKLEHRNSKGCNYGPPYEWQVYNTLNGCYGIPSVHYKGRQGDYYILVMDMLGPSLWDVWNSMGQAMTPNMAACIAVESISILEKLHSKGFVHGDVKPENFLLGQPGSPDDKKLYLIDLGLASKWKENNGHHVDYDQRPDIFRGTIRYASVHAHLGRTGSRRDDLESLAYTLIFLIRGRLPWQGYQGDTKSFLVCKKKMATSPEMLCCFCPAPFKQFLEIVTNMKFDEEPNYAKLISIFDGLIEAPASRPVRIDGALKVGQKRGRLHANLEDEQPKKKVRLGSPAAQWISVYNARRPMKQRYHYNVADSRLSQHIEKGNDDGLYVSCVASSANLWALIMDAGTGFCSQVYELSPVFLHKDWIMEQWEKSYYITAIAGSTNGSSLVVMSKGLNFTFLIIAHTCILTLHFLTIFPVAVQNPNVSLVCPMQFPF

SEQ ID NO: 72234 - protein, 526 aa, Zea Mays
MAISTWSARLLLTPASSRATLSPPRPPTTNPLSSFFPRNRLHFVRPRPRPPCAYISAPAPGPEAAYAPPSLDATAAAADVAAAISSSDAVTWAGVWALLSRHRARIAVCIAALVACTTCTLSMPLFSGRFFETLIGRGNEPLWRLLSKIAILYTLEPIFTIIFVINITIIWEQVMARLRSQIFRRILIQKMLFFDRHKVGELTGLLTSDLGSLKSVVSDNISRDRGLRALSEIIGTLCILFTLSTELAPVLGLLMVSVSVLVAIFKRSTVPTFKSYGIVQARISDCASETFSAIRTVRSFGGEKRQISLFDNLAHAYQNNGTKLGVLKSANESLTRVVVYVSLMALYILGGRKVNAGKLSVGTMVSFIGYTFTLTFAVQGAVNTLGDLRGTLASVERINSILSAKDIDDSLAYGLAKELDGKEFDDSNGVYENGSVNKHFMSELKSSSSCSNLAWSGDIRLKEVHFSYPLRSNVEILNGLDLTIECGKVTALVGPSGAGKSTVVQLLARYYEEKTSVYLTKGNGLE

SEQ ID NO: 72235 - protein, 448 aa, Zea Mays
MDDDDDDEDGESDDDSLADDFLAGSDEGSEGGDSGLESDGSDDLEAKSRAIDEQKLKAEEDAEEELQTNIRSESDEFRLPTTEELEEEAHRPPNLPNLKRRISEIVRVLSNFSKLRQKDVPRKDYINQLKTDVMSYYGYNDFLVEALIEMFPAVELVELLEAFEKRPPECLRTNTLKSRRRDLAAALIPRGFNLDPIGKWSKVGLVVYDSTISAGATTEYMAGHYMKQGASSFLPVMALAPQEKERIVDMAAAPGGKTTYIGALMKNTGIIYANEFNEKRLHGLMGNIHRMGVTNTIICNYDGKELPKVLGMNSVDRVLLDAPCTGTGTIWKDLQIKTSKDIEDIRNCAFVQKQLLLAAIDLVDANSKTGGYIVYSTCSIMIPENEAVIDYALKKRNVKLVPCGLDFGRPGFIRYREHRFHTSLEKTRRFYPHVNNMDGFFVAKVLSV

SEQ ID NO: 72236 - protein, 319 aa, Zea Mays
MAMGLPGLRCHRLLARGSLPPLGPALYRRPLERTSALRYSSLQAQAGDSIGEEALRMFLEDRQLHGDFVTKVSDMVWRRNGANVGAAEATTGQGSAIDVAQPEDVREDAVDEGMLRLAAITSDWVSGDSSPPLSKRLSAEERQNESNKRKELNLLKYEADELLLLTAGTGAACSLYCLLVFSLETAVSYALGVGFSCLYLQLLYQHADNLSKEDIPEVFLKKKVKKIGITSEDLKNTIEKTLGGAGLALSSPRLIIPAVIYGLSALSHHFQNSFFSFEVLPGMMGFLAYKAAALVQVYRDNEDLRLILPDEEAADSDST

SEQ ID NO: 72237 - protein, 248 aa, Zea Mays
MRRVVFYNARINKWLRAPDMLQKRHFFGSCVINNCLYVAGGECVGIQRILRSAEVYDPNRNRWSSIAEMSTGMVPSIGVVHDGKWYLKGLNSHRQVMSEHYLPASKMWSATGNEMVTGWRNPSISLNGHLYFADCRNGCKLRVYNREMGSWTRFIDTRHHMGSSRSLEASAFVSLNGMLCIIRNNMSITTVDILDPTTAAEVDRARMWEAFARKWQHRSSFMANIWSIITGCNLKTDIMHCQVLQLQV

SEQ ID NO: 72238 - protein, 304 aa, Zea Mays
MTQPGNIYNPNLQQVTLSRNEPSPSYNLDSNRNTLQQYAQGPSDRHMDQMDTGGTTPSNYFEGDRRVDGDSQLYQPDGDALPGIEGFQIAGEPRPGFQLTACGFPTNGTTLCNFQWVRHLENGTRQSIEGATMYDYVVTADDVGTFLAVDCTPMDDNGRQGDLVTEFANNGNKITCDPEMQSHIDAYISNGRAEFEVFVLQAYSPEEWELATLVLTRPNYQIKFKKTGEAIIDEKYSQSLQMKIPNGRTTQFVLVTAGATLPFNTQGISEPNNEDYDVRLRDLIVLVMRTFQKKALDAKRKVNT

SEQ ID NO: 72239 - protein, 229 aa, Zea Mays
MRPYCSLQCSIAQGDISFEPHETVVSMEYLLGLVLALLGGSVKMQDYSDERKSQILDVVKSLAGGFDMDVIFTRTDGFTMTQEWLLLDCLDLNLRHGWIAARDLLTGPEVSFESLTLASNEPGFPHAEEIKNFLRGPQLTPIGLVSLQEDFVENVPCILFWNKHYHTIVMINGVLNSLVTDSNYLETRIVWQTLDGVNGDGVYLDNNFTPVYVGLDAATSVYVMWPKIN

SEQ ID NO: 72240 - protein, 104 aa, Zea Mays
MDDDGGAFPSTSASAASRSLRRWFPFDPSPLPLVGPLLLVVVQELQRDTDSPTSKARIKYDEENLRSITKCEHHFHLCCILEWMERKDTCPVCDQITLVDEMFE

SEQ ID NO: 72241 - protein, 379 aa, Zea Mays
MALAKASLVDDLQNKNQELMKQIEICQEENKILDRMHRQKVAEVEKLTQTVRELEESVLAGGAAANAVRDYQRKVQEMNEEMKTLDRELARAKVSANRVAVVVANEWKDGDDKVMPVKRWLEERRILQQLRDKLAIAERAARSEAQLKEKFQLRLKVLEEGLRMSTSRTNVSGTRRQSIGGADGLSKANGFLSKRPSFQMRSPVSTTTTLVNHAKGASKSFDGGCRSLERYKGHVNGNGMNVSTDSSEDKDSNNSDEKCNEFASAESEDSVSGVLYDMLQKEVISLRKACHEKDQSLKDKDDAVEMLAKKVDTLTKAMESDAKKSRRELAAMEKELAAVRLEKEQDNRARRFGSSSGSASSSQLPPGRTLPRSGSARNM

SEQ ID NO: 72242 - protein, 90 aa, Zea Mays
MGRVPRCAMMLEGGGSRMADGRLLLEAIVFNFSAMQRSACWSVQFQPSCVKLSKEQTHPGRICKLKRMMEKNCLLYKVLSNFTWVDKINN

SEQ ID NO: 72243 - protein, 216 aa, Zea Mays
MEDPVAAPSSSSAAPAASAAARISAAAAAAVTSAVTSAPPALAPLQPSGTAAAVPEAASTCRRQLFTVELRPGESTIVSWKKLLKEAGHTATAPPVAPEPKFAAHAGPSGAAHPAENDPKDPMQSLKKLSAFTWENIAVTKRILMMYQMMISMTLRILSLMMLNWLALKNLLVCLTPKHKSKAWARSCPFSHELQCRYVWVGQRFGGFLDLCESSS

SEQ ID NO: 72244 - protein, 458 aa, Zea Mays
MASGDLLLRAHAGAPVLARAFSCRLLVPARRRSGLISPLAASKVGIADVVGRVRSGGADQKRRRRDAKEGFGFSGVATRRELIDDEKVEQDEEDEALKLGVEKNGGETGGVDGSYLSETRFDQCAISPLSMKAVKDAGYERMTEVQEATLPIILQGKDVLAKAKTGTGKTVAFLLPAIEVLSTLPHQRGQLRPPINLLVMCPTRELANQVAVEARKLLRYHRTLGVQVVIGGTRLTQEQRSMQANPCQILVATPGRLKDHLENTPGFSTRLKGVKVLVLDEADRLLDMGFRRDIEKIIASIPRERQTLLFSATVPEEVRQISHVAMKKDYRFINTVKEGDEETHAQVSQMYMVAPLDLHFSILYDVLKKHVAEDADYKVIIFCTTAMVTKLVAEVLSQLKLNIREIHSRKSQSARTKVSDEFRKSKGLILVSSDVSARGVDYPDVTLVIQIESSTYID

SEQ ID NO: 72245 - protein, 828 aa, Zea Mays
MGPWAVDLALSVGIFPYVLKLLPTNTIELRQILVFIWTKILSLDKSCQVDLVKDGGHTYFIRFLDSLDAFPEQRAMAAFVIAVIVDGHRMGQEACMNAGLIDVCLRHLQPENLHAQTEPLLLQWLCLCLGKLWEDFPEAQLLGLQTNAPETVICLLSEPRPEVKAEINVVRSLLQISSDGSPLVRSEVAIALTHFALGHNKNLKSVAAEYWKPQSKSLLKSLPSLANINNPSNVYSPNNILQGSIGPVLRVGSDSGAAGRDGHISTSSPIAASSIMHGSPQSDDSSQHSDSGILLRENASNGGLSYTRSRPVDNVIYSQFISTMCSVSKDPDPRIATIGWRALTLIGVEQVAMKSTRFNSGGLHRGETSASTFGMAHSSSWRDMNSGSNSMKFMTPPVSPPQHDYLLLGLRRVCSMEFGQHPINSPDGFANLLLSSATGPSNAELKKLPESTIYNWSCGHFSRPLLTASDDNEETNARREERERIALDFITKCQRSSACKITSQIASWDTRFELGTKAALLLPFSPIVVAADENEKISVWNYDDAQPVNSFHNHKLSDRGLSKLLLINELDECLLLAASSDGNVRIWKNFACKGGQKLVTAFSSVQGHRAAGRSIVIDWQQQSCYLYASGDMSSILVWDLDKEQLLNTIPSSADSAISALSASQVRSGYFAAGFADGSVRIYDVCSPDSRPVYVARPHAPRTEKVVGIGFQPGFDPYEIVSASQAGDIQFLDVRMAAEPYLTIEAHRGSLTALAVHRHAPVVASSAKQMIKVFSLEGEQLRIIRYLPSFMGQRTGSVNCLSFHPYKSLLAAGAGHNALVSIYAEENYK

SEQ ID NO: 72246 - protein, 549 aa, Zea Mays
MPLSEPSAPAVLAALPRALSLAAAAVAAATATLLLISAVFSTPHHAASSSSPQLSPSASASTAAPVAPAPAHAPDSGPGHPHPPPPVPPCPPNATHDVPCHEPPSRERHCPPRPPPPPPLLPHPPKDPPPHPPPHCRVPPPPRYRPPPPWPARRDRARYANVDLPPLPPVKAADGQQQDPVHGRGEWLLFTDGVQGYVERLERVVPLRDGVVHTALDIGCGVASFGDYLLNYGVLTMSIAPRDRFEPQVQLALERGLPAMIGALVAHRLPYPSRSFDMVHCADCRVPWTAHDGLYMLEIDRLLQPGGYWVFSKPPVNWKSTYNISNQGTIDKQDNQVAMDDMSKRLRWTKVSEEGTISVWRKPSCNLHCDQEANAKLAGLPPLCTGEDPDSAWYANISMCMTCIPRAETFNGCAGGAMKKWPKRLGAVPPRIASGEIEWLSIQRYRYDTLVWEKRVNFYLTYLNFLSNGTYRNVMDMSAGSGGFAAAMSKHPVWVMNVVPANTTENALGVIYERGLIGTYTDWCEAFSTYPRTYDLIHGNGIFSSHIHK

SEQ ID NO: 72247 - protein, 133 aa, Zea Mays
MLSKLVFKDEGPSSSTIMLCKMFDLLFITALASLWRHTTRRVVGPDGMDYLQNVFCIIGLVMFHGRVQWCSMKTVACKIFMTSCGIVSLRGVVVMVHSFAILERSLRTATECATIVLPLLSRRILMSPTIQKL

SEQ ID NO: 72248 - protein, 288 aa, Zea Mays
MAGRDSLPEGSLFLGLDSSTQSLKATVLNNELTIVASEIVNFDSELPHYKTEGGVYRDPADDRHIFSPTIMWVEALDVLLEKLKPKINFGKVVAVSGSGQQHGSVYWKKGSHAVLSSLDASKSLLSQLKDAFSTMNSPLWMDSSTTKQCREIENAVGGALELAKLTGSRAYERFTGPQIRKIYQTEPDVYEDTERISLVSSFMASILVGSYASIDETDGAGMNLMDIKQRIWSKSALEATAPGLEAKLGNLAPAYSAAGRIAPYFVESLIRTVWSFSGLEIILIALQV

SEQ ID NO: 72249 - protein, 69 aa, Zea Mays
MYCRIATFYAPAHNYIPLLISSPTRVSAHSDRPSICIQSTVTIVSSRYTANQTTHSNDLQNGKLTICKT

SEQ ID NO: 72250 - protein, 397 aa, Zea Mays
MGKSVVVGAAVVACAAVGVAAVLVHRRRKRDAALLGSAEAERRRRAAAVIEEVERSLATPTALLRGIADAMVAEMERGLRGDIHAQLKMLISYVDNLPTGDEHGLFYALDLGGTNFRVLRVQLGGREKRVVKQQYEEVSIPPHLMVGTSIELFDFIAAALAKFVDTEGEDFHLPEGRQRELGFTFSFPVNQTSISSGTLIKWTKGFSINGTVGEDVVSELSRAMERQGLDMKVTALVNDTVGTLAGGRYMDNDVVAAVILGTGTNAAYVEHANAIPKWTGLLPKSGNMVINTEWGSFKSGKLPLSEYDKAMDFESLNPGEQIYEKMISGMYLGEIVRRILLKLAHDASLFGDVVPTKLEQPFILRTPDMSAMHHDSSHDLKTLGSKLKDIVGILPWK

SEQ ID NO: 72251 - protein, 594 aa, Zea Mays
MDEEEVHIAVGKNSRKEKANILWAAANFPRATIVLVHVHWPSKWMPFMGGKVLYKFADEKEKEMHRGREMKVMVNMLSQYKKMCGTRKVSAHYLTHDDTVAGVVNLIKKLKIKRIVIGSRNMSRQVVVRQCCQVWLVLNGKHISTSENIGYGGGSSGILASIHELGEESDGYVTPRSDLVDETMDEESAEMNDSDQLVTEDETLTEQGTEESVTSEDMENFFQENADQSDEIQNFRNIADKAEKIMEEIDRLQKKLKQLQGEERNHDERSLSPRQMAASLKRKSLSEPRYPELQIPENIEQFSMSQIEKATDNFHSRNFIGGGGYGPVYKGKVGSTSVAIKLLKPRGRQGFSEYQQEVVVLSKLEHPHIVRLIGVCPESCGLVYEHLPNGTLKDRLSKGLLWKDRVRILGELRSALAYLHSRRPHAIIHADVKLTNILLDAGNASRLGDFGTARAVHVKPLEEETIGRRTNPMGTAGYMDPVFFMTGELTTESDVYAFGMVILQMLTGLLDLNVAEQAREAVKMDAVHSVLDASAGPWPEVQAEKLMKLALRCCSLERRRRPAITSDAEWRSLDILRAMVNPASKSWKWNSHAS

SEQ ID NO: 72252 - protein, 53 aa, Zea Mays
MSHPDLRGKAGCVSYVHQRRTTHIMTNYIEINVINIITLWKCLTKINDNNKAN

SEQ ID NO: 72253 - protein, 339 aa, Zea Mays
MWRATRRSPPFLRWLSSDAASSKAPRQRVAALWGNGDYGRLGLGSLESRWSPTVCPFFLARAADPPASLACGGAHTLFLTQNGRVFATGLNDFGQLGIGTSVTHMLEPVEISGFHERVVEVSAGNHHSCAVTADGKLFVWGRNSGGQLGLGKGKVVSTPTKVDCLTDLRVKTVALGSEHSIAVTEEGEVLSWGAAGSGRLGHGRQSSILGFSLTSTEYTPRLIKNFDGIKIKKIAAGMLHSACIDEKGTLFIFGQKTEKGFGRPNEEFRPNIVEEIPFSEEVACGGYHTCVVTDSGDLYSWGSNENGCLGLGYFICDFFNNFPTSSCILWLEAHSCSFR

SEQ ID NO: 72254 - protein, 184 aa, Zea Mays
MQKGRKMEHADKENIAARFAQMWNEIVTSFRDEDLIDNREKELLLVPYVSDRTLGVVQWPPFLLASKIPIAVDMAKDSNGKDRDLRKRLDNDYYFKCAIEECYASFKNIINGLVQGEPEKRVINKIFVEVEKCISEDKVIADLNMRALPDLYFKFVELVNYLEKNDHPNLPRNYMRPRYAGQYH
